(19) United States
(12) Patent Application Publication
(10) Pub. No.: US 2012/0178691 A1
(43) Pub. Date: Jul. 12, 2012

(54) FACTOR VIII COMPOSITIONS AND METHODS OF MAKING AND USING SAME

(75) Inventors: Volker Schellenberger, Palo Alto, CA (US); Pei-Yun Chang, Menlo Park, CA (US); Fatbardha Varfaj, Mountain View, CA (US); Joshua Silverman, Sunnyvale, CA (US); Chia-Wei Wang, Milpitas, CA (US); Benjamin Spink, San Carlos, CA (US); Nathan Geething, San Juan, PR (US)

(73) Assignee: Amunix Operating Inc., Mountain View, CA (US)

(21) Appl. No.: 13/423,031

(22) Filed: Mar. 16, 2012

Related U.S. Application Data
(63) Continuation of application No. 13/365,166, filed on Feb. 2, 2012.
Application No. 13/365,166 is a continuation of application No. PCT/US2011/048517, filed on Aug. 19, 2011.
(60) Provisional application No. 61/401,791, filed on Aug. 19, 2010.

(51) Int. Cl. A61K 38/37; C12N 15/62; C12N 15/63; A61P 7/04; C12N 1/19; C12N 1/15; C12N 1/21; C07K 19/00; C12N 5/10

(52) U.S. Cl. 514/14.1; 530/383; 536/23.4; 435/320.1; 435/325; 435/365; 435/352; 435/358; 435/369; 435/353; 435/354; 435/366; 435/254.2; 435/254.21; 435/254.23; 435/254.11; 435/254.3; 435/254.4; 435/254.7; 435/254.6; 435/252.3; 435/252.33; 435/252.31; 435/252.34; 435/252.35

(57) ABSTRACT

The present invention relates to compositions comprising factor VIII coagulation factors linked to extended recombinant polypeptide (XTEN), isolated nucleic acids encoding the compositions and vectors and host cells containing the same, and methods of making and using such compositions in treatment of factor VIII-related diseases, disorders, and conditions.

### CROSS REFERENCE TO RELATED APPLICATION

[0001] This application is a Continuation Application which claims the benefit of U.S. application Ser. No. 13/365,166, filed Feb. 2, 2012; which is a Continuation Application of PCT Application No. PCT/US2011/48517, filed Aug. 19, 2011, which claims the benefit of U.S. Provisional Application Ser. No. 61/401,791 filed Aug. 19, 2010, all of which are incorporated herein by reference in their entirety.

### BACKGROUND OF THE INVENTION

[0002] Factor VIII is an important component of the intrinsic pathway of the blood coagulation cascade. In the circulation, factor VIII is mainly complexed to von Willebrand factor. Upon activation by thrombin, (Factor Ha), it dissociates from the complex to interact with factor IXa in the intrinsic coagulation cascade, which, in turn, activates factor X. Once removed from the von Willebrand factor complex, activated factor VIII is proteolytically inactivated by activated Protein C (APC), factor Xa, and factor IXa, and is quickly cleared from the blood stream. When complexed with normal von Willebrand factor protein, the half-life of factor VIII is approximately 12 hours, whereas in the absence of von Willebrand factor, the half-life of factor VIII is reduced to 2 hours (Tuddenham E G, et al., Br J. Haematol. (1982) 52(2):259-267).

[0003] In hemophilia, the clotting of blood is disturbed by a lack of certain plasma blood clotting factors. Hemophilia A is a deficiency of factor VIII, and is a recessive sex-linked, X chromosome disorder that represents 80% of hemophilia cases. The standard of care for the management of hemophilia A is replacement therapy with recombinant factor VIII concentrates. Subjects with severe hemophilia A have circulating procoagulant factor VIII levels below 1-2% of normal, and are generally on prophylactic therapy with the aim of keeping factor VIII above 1% between doses, which can usually be achieved by giving factor VIII two to three times a week. Persons with moderately severe hemophilia (factor VIII levels of 2-5% of normal) constitute 25-30% hemophilia incidents and manifest bleeding after minor trauma. Persons with mild hemophilia A (factor VIII levels of 5-40% of normal) comprise 15-20% of all hemophilia incidents, and develop bleeding only after significant trauma or surgery.

[0004] The in vivo activity of exogenously supplied factor VIII is limited both by a short protein half-life and inhibitors that bind to the factor VIII and diminish or destroy hemostatic function. As such, frequent injections of factor VIII are required. Large proteins such as factor VIII are normally given intravenously so that the medicament is directly available in the blood stream. In addition, it has been previously demonstrated that an unmodified factor VIII injected intramuscularly yielded a maximum circulating level of only 1.4% of the normal plasma level (Pool et al, New England J. Medicine, vol. 275, no. 10, p. 547-548, 1966).

[0005] Chemical modifications to a therapeutic protein can modify its in vivo clearance rate and subsequent serum half-life. One example of a common modification is the addition of a polyethylene glycol (PEG) moiety, typically coupled to the protein via an aldehyde or N-hydroxysuccinimide (NHS) group on the PEG reacting with an amine group (e.g. lysine side chain or the N-terminus). However, the conjugation step can result in the formation of heterogeneous product mixtures that require extraction, purification and/or other further processes, all of which inevitably affect product yield and quality control. Also, the pharmacologic function of coagulation factors may be hampered if amino acid side chains in the vicinity of its binding site become modified by the PEGylation process. Other approaches include the genetic fusion of an Fc domain to the therapeutic protein, which increases the size of the therapeutic protein, hence reducing the rate of clearance through the kidney. In some cases, the Fc domain confers the ability to bind to, and be recycled from lysosomes by the FcRn receptor, resulting in increased pharmacokinetic half-life. Unfortunately, the Fc domain does not fold efficiently during recombinant expression, and tends to form insoluble precipitates known as inclusion bodies. These inclusion bodies must be solubilized and functional protein must be renatured from the misfolded aggregate, which is a time-consuming, inefficient, and expensive process.

### SUMMARY OF THE INVENTION

[0006] The present invention relates to novel coagulation factor VIII fusion protein compositions and the uses thereof. Specifically, the compositions provided herein are particularly used for the treatment or improvement of a condition associated with hemophilia A, deficiencies of factor VIII, bleeding disorders and coagulopathies. In one aspect, the present invention provides compositions of isolated fusion proteins comprising a factor VIII (FVIII) and one or more extended recombinant polypeptides (XTEN). A subject XTEN useful for constructing such fusion proteins is typically a polypeptide with a non-repetitive sequence and unstructured conformation. In one embodiment, one or more XTEN is linked to a coagulation factor FVIII (“CF”) selected from native factor VIII, factor VIII B-domain deleted sequences (“FVIII BDD”), and sequence variants thereof (all the foregoing collectively “FVIII” or “CF”), resulting in a coagulation factor VIII-XTEN fusion protein (“CFXTEN”). In an embodiment, the isolated fusion protein comprises a factor VIII polypeptide that comprises an A1 domain, an A2 domain, an A3 domain, and a C1 domain. In another embodiment, the factor VIII polypeptide further comprises a B domain or a portion thereof, an a3 domain, and a C2 domain. In another embodiment, the present disclosure is directed to pharmaceutical compositions comprising the fusion proteins and the uses thereof for treating, e.g., factor VIII-related diseases, or conditions. The CFXTEN compositions have enhanced pharmacokinetic properties compared to FVIII not linked to XTEN, which may permit more convenient dosing and improved efficacy. In yet another embodiment, the CFXTEN compositions of the invention do not have a component selected the group consisting of: polyethylene glycol (PEG), albumin, antibody, and an antibody fragment.

[0007] In an embodiment, the invention provides an isolated fusion protein comprising a factor VIII polypeptide and at least one extended recombinant polypeptide (XTEN), wherein said at least one XTEN is linked to the factor VIII polypeptide at one or more locations. For example, the at least one XTEN is linked to one or more locations selected from the C-terminus of said factor VIII polypeptide, within the A1 domain of said factor VIII polypeptide; within the A2 domain of said factor VIII polypeptide, within the A3 domain of said factor VIII polypeptide; within the B domain of the factor VIII polypeptide, within the C1 domain of said factor VIII polypeptide; at one or more location between any two adjacent domains of said factor VIII polypeptide (for example, between the A1 and A2 domains, the A2 and B domains, the B and a3 domains, the a3 and A3 domains, the A2 and a3 domains when the B domain is completely deleted, the A2 and A3 domains, and the A3 and C1 domains, the C1 and C2 domains or any combination thereof); at the N-terminus of said factor VIII polypeptide; at one or more insertion locations from FIG. 5; at one or more insertion locations from Table 5; at one or more insertion locations from Table [23], and/or any combination thereof. In an embodiment, In an embodiment, the XTEN is characterized in that: the XTEN comprises at least 36, or at least 42, or at least 72, or at least 96, or at least 144, or at least 288, or at least 400, or at least 500, or at least 576, or at least 600, or at least 700, or at least 800, or at least 864, or at least 900, or at least 1000, or at least 2000, to about 3000 amino acid residues or even more residues; the sum of glycine (G), alanine (A), serine (S), threonine (T), glutamate (E) and proline (P) residues constitutes at least about 80%, or at least about 90%, or at least about 95%, or at least about 96%, or at least about 97%, or at least about 98%, or at least about 99% of the total amino acid residues of the XTEN; the XTEN is substantially non-repetitive such that (i) the XTEN contains no three contiguous amino acids that are identical unless the amino acids are serine; (ii) at least about 80% of the XTEN sequence consists of non-overlapping sequence motifs, each of the sequence motifs comprising about 9 to about 14, or about 12 amino acid residues consisting of four to six amino acids selected from glycine (G), alanine (A), serine (S), threonine (T), glutamate (E) and proline (P), wherein any two contiguous amino acid residues do not occur more than twice in each of the non-overlapping sequence motifs; or (iii) the XTEN sequence has a subsequence score of less than 10; the XTEN has greater than 90%, or greater than 95%, or greater than 99% random coil formation as determined by GOR algorithm; the XTEN has less than 2% alpha helices and 2% beta-sheets as determined by Chou-Fasman algorithm; the XTEN lacks a predicted T-cell epitope when analyzed by TEPITOPE algorithm, wherein the TEPITOPE threshold score for said prediction by said algorithm has a threshold of −9, and wherein said fusion protein exhibits a terminal half-life that is longer than at least about 12 h, or at least about 24 h, or at least about 48 h, or at least about 72 h, or at least about 96 h, or at least about 120 h, or at least about 144 h, or at least about 21 days or greater. In one embodiment, the isolated fusion protein comprises at least another XTEN, which can be identical or different to the first XTEN, In one embodiment, the at least another XTEN is linked to the factor VIII polypeptide at one or more locations. For example, the at least another XTEN is linked to one or more locations selected from the C-terminus of said factor VIII polypeptide, within the A1 domain of said factor VIII polypeptide; within the A2 domain of said factor VIII polypeptide, within the A3 domain of said factor VIII polypeptide; within the B domain of the factor VIII polypeptide, within the C1 domain of said factor VIII polypeptide; at one or more location between any two adjacent domains of said factor VIII polypeptide (for example, between the A1 and A2 domains, the A2 and B domains, the B and a3 domains, the a3 and A3 domains, the A2 and a3 domains when the B domain is completely deleted, the A2 and A3 domains, and the A3 and C1 domains, the C1 and C2 domains or any combination thereof); at the N-terminus of said factor VIII polypeptide; at one or more insertion locations from FIG. 5; at one or more insertion locations from Table 5; at one or more insertion locations from Table [23], and/or any combination thereof. In another embodiment of the isolated fusion protein, the at least another XTEN is linked to the factor VIII polypeptide at the C-terminus of the factor VIII polypeptide, In another embodiment of the isolated fusion protein, the at least another XTEN is linked within the B domain of said factor VIII polypeptide. In some embodiments, the at least another XTEN is linked within the B domain within the sequence SFSQNPPVLKRHQR. In one embodiment of the foregoing, the at least another XTEN is linked between the S and Q residues of the sequence SFSQNPPVLKRHQR. In another embodiment of the foregoing, the at least another XTEN is linked between the N and P residues of the sequence SFSQNPPVLKRHQR. In another embodiment, the isolated fusion protein comprises FVIII and multiple XTEN sequences which are inserted within the B domain and to the N-terminus and/or the C-terminus of the factor VIII polypeptide. In another embodiment, the isolated fusion protein comprising FVIII and multiple XTEN sequences, one of which is linked to the N-terminus and/or the C-terminus of the factor VIII polypeptide and another is inserted within the B domain of the factor VIII polypeptide, such insertion takes place at the C-terminal end of about amino acid residue number 740 to about 745 (or alternatively about amino acid residue number 741 to about 743 of the B-domain) of the B-domain and to the N-terminal end of amino acid residue numbers 1640 to about 1689 (or alternatively about 1638 to about 1648 of the B-domain) of the B-domain of a native FVIII sequence. The resulting fusion protein has a cumulative length of the XTEN portion in the range of at least about 100 to about 3000 amino acid residues. In another embodiment, the isolated fusion protein comprises at least a second XTEN, which may be identical or different to the first XTEN, wherein said at least second XTEN is linked to said factor VIII polypeptide at one or more locations selected from the following: i) at or within 6 amino acids to the N- or C-terminus side of an insertion location from Table 5 or Table 25 or as illustrated in FIG. 7; ii) a location between any two adjacent domains of said factor VIII polypeptide, wherein said two adjacent domains are selected from the group consisting of A1 and A2 domains, A2 and B domains, B and A3 domains, A3 and C1 domains, and C1 and C2 domains; iii) the N-terminus of said factor VIII polypeptide; and the C-terminus of said factor VIII polypeptide. In the foregoing embodiments, the at least second XTEN can have the same characteristic as the first XTEN. For example, the second XTEN is characterized in that: the XTEN comprises at least 36, or at least 42, or at least 72, or at least 96, or at least 144, or at least 288, or at least 400, or at least 500, or at least 576, or at least 600, or at least 700, or at least 800, or at least 864, or at least 900, or at least 1000, or at least 2000, to about 3000 amino acid residues; the sum of glycine (G), alanine (A), serine (S), threonine (T), glutamate (E) and proline (P) residues constitutes at least about 80%, or at least about 90%, or at least about 95%, or at least about 96%, or at least about 97%, or at least about 98%, or at least about 99%, of the total amino acid residues of the XTEN; the XTEN is substantially non-repetitive such that (i) the XTEN contains no three contiguous amino acids that are identical unless the amino acids are serine; (ii) at least about 80% of the XTEN sequence consists of non-overlapping sequence motifs, each of the sequence motifs comprising about 9 to about 14, or about 12 amino acid residues consisting of four to six amino acids selected from glycine (G), alanine (A), serine (S), threonine (T), glutamate (E) and proline (P), wherein any two contiguous amino acid residues do not occur more than twice in each of the non-overlapping sequence motifs; or (iii) the XTEN sequence has a subsequence score of less than 10; the XTEN has greater than 90%, or greater than 95%, or greater than 99%, random coil formation as determined by GOR algorithm; the XTEN has less than 2% alpha helices and 2% beta-sheets as determined by Chou-Fasman algorithm; the XTEN lacks a predicted T-cell epitope when analyzed by TEPITOPE algorithm, wherein the TEPITOPE threshold score for said prediction by said algorithm has a threshold of −9. In some embodiments, the XTEN of the fusion proteins are further characterized in that the sum of asparagine and glutamine residues is less than 10%, or less than 5%, or less than 2% of the total amino acid sequence of the XTEN, the sum of methionine and tryptophan residues is less than 2% of the total amino acid sequence of the XTEN, and the XTEN has less than 5% amino acid residues with a positive charge. In one embodiment, the fusion proteins of this paragraph comprise one or more XTEN having at least 80%, or at least about 90%, or at least about 95%, or at least about 96%, or at least about 97%, or at least about 98%, or at least about 99% or sequence identity compared to a sequence of comparable length selected from any one of Table 4, Table 9, Table 10, Table 11, Table 12, and Table 13, when optimally aligned.

[0008] In one embodiment, the isolated fusion protein comprises a FVIII polypeptide having at least 80% sequence identity, or at least about 90%, or about 95%, or about 96%, or about 97%, or about 98%, or about 99% sequence identity compared to an amino acid sequence selected from Table 1, when optimally aligned. In one embodiment, the FVIII polypeptide of the isolated fusion protein comprises human FVIII. In another embodiment, the FVIII polypeptide of the fusion protein comprises a B-domain deleted (BDD) variant of human FVIII.

[0009] In one embodiment, the isolated fusion protein that comprises a factor VIII and one or more XTEN exhibits an apparent molecular weight factor of at least about 1.3, or at least about two, or at least about three, or at least about four, or at least about five, or at least about six, or at least about seven, or at least about eight, or at least about nine, or at least about 10, when measured by size exclusion chromatography or comparable method.

[0010] In an embodiment, the isolated fusion protein comprises a factor VIII polypeptide that is linked to an XTEN described herein via one or two cleavage sequences that each is cleavable by a protease selected from the group consisting of factor XIa, factor XIIa, kallikrein, factor VIIa, factor IXa, factor Xa, factor Ha (thrombin), elastase-2, MMP-12, MMP13, MMP-17, MMP-20, or a protease of Table 7 wherein cleavage at the cleavage sequence by the protease releases the factor VIII sequence from the XTEN sequence and wherein the released factor VIII sequence exhibits an increase in procoagulant activity of at least about 30%, or at least about 40%, or at least about 50%, or at least about 60%, or at least about 70%, or at least about 80%, or at least about 90% compared to the uncleaved fusion protein. In one embodiment, the isolated fusion protein comprising factor VIII and one or more XTEN linked with one or more integrated cleavage sequences has a sequence having at least about 80% sequence identity compared to a sequence from Table 30, alternatively at least about 81%, 82%, 83%, 84%, 85%, 86%, 87%, 88%, 89%, 90%, 91%, 92%, 93%, 94%, 95%, 96%, 97%, 98%, 99%, or about 100% sequence identity as compared to a sequence from Table 30, when optimally aligned. However, the invention also provides substitution of any of the FVIII sequences of Table 1 or Table 31 for a FVIII in a sequence of Table 30, and substitution of any XTEN sequence of Table 4 for an XTEN in a sequence of Table 30, and substitution of any cleavage sequence of Table 7 for a cleavage sequence in a sequence of Table 30. In embodiments having the subject cleavage sequences linking the FVIII to the XTEN, cleavage of the cleavage sequence by the protease releases the XTEN from the fusion protein. In one embodiment, wherein the fusion protein is in the presence of proteases capable of cleaving the cleavage sequence and activating FVIII, the cleavage of the cleavage sequence linking XTEN to FVIII occurs prior to or concomitant with activation of FVIII. In some embodiments of the fusion proteins comprising cleavage sequences that link XTEN to FVIII, the FVIII component becomes active or has an increase in activity upon its release from the XTEN by cleavage of the cleavage sequence, wherein the resulting procoagulant activity of the cleaved protein is at least about 30%, or at least about 40%, or at least about 50%, or at least about 60%, or at least about 70%, or at least about 80%, or at least about 90% compared to the corresponding FVIII not linked to XTEN. In other embodiments, the fusion protein comprises XTEN linked to the FVIII by a cleavage sequence that is cleavable by a procoagulant protease that does not activate a wild type factor VIII, wherein upon cleavage of the cleavage sequence, the XTEN is released from the fusion protein. In one embodiment of the foregoing, the cleavage sequence is cleavable by activated factor XI. In another embodiment, the fusion protein comprises XTEN linked to the FVIII by two heterologous cleavage sequences that are cleavable by different proteases, which can be sequences selected from Table 7. In a preferred embodiment, the cleavage sequence is cleavable by factor XIa, wherein the XIa protease is capable of cleaving the XTEN from the fusion protein.

[0011] In other embodiments, the isolated CFXTEN fusion proteins comprise two, three, four, five, six or more XTEN (each characterized as described above) linked to the FVIII. In the foregoing, each XTEN, which can be identical or can be different, comprises at least 36 to about 400, or 800, or 1000, or 1500, or 2000 to about 3000 amino acids and the cumulative length of the XTEN sequences is at least about 100 to about 3000, or about 200 to about 2000, or about 400 to about 1500, or about 800 to about 1200 amino acid residues. In one embodiment of the CFXTEN with two or more XTEN, each XTEN has at least 80% sequence identity, or at least about 90%, or about 95%, or about 96%, or about 97%, or about 98%, or about 99% sequence identity to a sequence of comparable length selected from any one of Table 4, Table 9, Table 10, Table 11, Table 12, or Table 13, when optimally aligned. In the foregoing embodiments with two or more XTEN, the fusion proteins exhibit an apparent molecular weight factor of at least about 1.3, or at least about 2, or at least about 3, or at least about 4, or at least about 5, or at least about 6, or at least about 7, or at least about 8, or at least about 9 or at least about 10 when measured by size exclusion chromatography or comparable method. In the isolated fusion proteins of the foregoing embodiments with two or more XTEN, the XTEN are linked to the factor VIII at different locations selected from insertion locations from Table 5 or Table 25 or as illustrated in FIG. 7, or between any two adjacent domains in the factor VIII sequence wherein said two adjacent domains are selected from the group consisting of A1 and A2, A2 and B, B and A3, A3 and C1, and C1 and C2; or the N-terminus of the factor VIII sequence, or the C-terminus of the factor VIII sequence.

[0012] The isolated fusion proteins of the embodiments comprising at least one, two, three, four, five, six, or more XTEN sequences exhibit a prolonged half-life as compared to a corresponding factor VIII polypeptide lacking said XTEN. In one embodiment, the isolated fusion proteins exhibit a serum degradation half-life that is at least two-fold, or three-fold, or four-fold, or five-fold longer than a factor VIII polypeptide lacking said XTEN. In another embodiment, the isolated fusion proteins exhibit a terminal half-life that is longer than about 24, or about 48, or about 72, or about 96, or about 120, or about 144, or about 168 hours or more when administered to a subject.

[0013] Non-limiting embodiments of fusion proteins with a single FVIII linked to a single XTEN are presented in Tables 14 and 28. In one embodiment, the invention provides a fusion protein composition has at least about 80% sequence identity compared to a sequence from Tables 14 or 28, alternatively at least about 81%, 82%, 83%, 84%, 85%, 86%, 87%, 88%, 89%, 90%, 91%, 92%, 93%, 94%, 95%, 96%, 97%, 98%, 99%, or about 100% sequence identity as compared to a sequence from Tables 14 or 28. Non-limiting embodiments of fusion proteins with a single FVIII with one or more XTEN linked internally or terminal to the FVIII sequence are presented in Tables 14 and 29. In one embodiment, the invention provides a fusion protein composition that has at least about 80% sequence identity compared to a sequence from Table 14 or Table 29, alternatively at least about 81%, 82%, 83%, 84%, 85%, 86%, 87%, 88%, 89%, 90%, 91%, 92%, 93%, 94%, 95%, 96%, 97%, 98%, 99%, or about 100% sequence identity as compared to a sequence from Table 14 or 29. In the embodiments of this paragraph, the invention further contemplates substitution of a different FVIII from Table 1 or Table 31 for the FVIII of any listed sequence, and a different XTEN from Tables 4 or 9-12 for an XTEN of any listed sequence.

[0014] The invention provides that the fusion proteins of the embodiments, with FVIII and XTEN characterized as described above, can be in different N- to C-terminus configurations. In one embodiment of the fusion protein composition, the invention provides a fusion protein of formula I:

(CF)-(XTEN) I

wherein independently for each occurrence, CF is a factor VIII as described herein and XTEN is an extended recombinant polypeptide wherein the XTEN comprises at least 36 to about 3000 amino acid residues, the sum of glycine (G), alanine (A), serine (S), threonine (T), glutamate (E) and proline (P) residues constitutes at least about 80%, or at least about 90%, or at least about 95%, or at least about 99% of the total amino acid residues of the XTEN; the XTEN is substantially non-repetitive such that (i) the XTEN contains no three contiguous amino acids that are identical unless the amino acids are serine; (ii) at least about 80%, or at least about 90%, or at least about 95%, or at least about 99% of the XTEN sequence consists of non-overlapping sequence motifs, each of the sequence motifs comprising about 9 to about 14, or about 12 amino acid residues consisting of four to six amino acids selected from glycine (G), alanine (A), serine (S), threonine (T), glutamate (E) and proline (P), wherein any two contiguous amino acid residues do not occur more than twice in each of the non-overlapping sequence motifs; or (iii) the XTEN sequence has a subsequence score of less than 10, the XTEN has greater than 90%, or greater than 95%, or greater than 99% random coil formation as determined by GOR algorithm; the XTEN has less than 2% alpha helices and 2% beta-sheets as determined by Chou-Fasman algorithm; and the XTEN lacks a predicted T-cell epitope when analyzed by TEPITOPE algorithm, wherein the TEPITOPE threshold score for said prediction by said algorithm has a threshold of −9. In one embodiment, the XTEN exhibits at least about 80%, or at least about 90%, or at least about 95%, or at least about 99% sequence identity to a sequence of comparable length from any one of Table 4, Table 9, Table 10, Table 11, Table 12, and Table 13, when optimally aligned.

[0015] In another embodiment of the fusion protein composition, the invention provides a fusion protein of formula II:

(XTEN)ₓ-(S)ₓ-(CF)-(XTEN)_{y} II

wherein independently for each occurrence, CF is a factor VIII as described herein; S is a spacer sequence having between 1 to about 50 amino acid residues that can optionally include a cleavage sequence from Table 7 or amino acids compatible with restrictions sites; x is either 0 or 1; and XTEN is an extended recombinant polypeptide as described herein, e.g., as for formula I, and wherein the fusion protein comprises two XTENs, the XTENs are identical or different and the cumulative length of the XTENs is between about 100 to about 3000, or between 200 to about 2000, or between 400 to about 1000 amino acid residues.

[0016] In another embodiment of the fusion protein composition, the invention provides an isolated fusion protein, wherein the fusion protein is of formula III:

(XTEN)_{w}-(S)ₓ-(CF)-(S)_{y}-(XTEN)_{z} III

wherein independently for each occurrence, CF is a factor VIII; S is a spacer sequence having between 1 to about 50 amino acid residues that can optionally include a cleavage sequence from Table 7 or amino acids compatible with restrictions sites wherein for each occurrence, if there is any, the sequence of the spacer can be the same or different; w is either 0 or 1; x is either 0 or 1; y is either 0 or 1 wherein w+x+y+z≧1; and XTEN is an extended recombinant polypeptide as described herein, e.g., as for formula I, and wherein the fusion protein comprises two XTENs, the XTENs are identical or different and the cumulative length of the XTENs is between about 100 to about 3000, or between 200 to about 2000, or between 400 to about 1000 amino acid residues. In one embodiment of formula VII, the spacer sequence is GPEGPS. In another embodiment of formula VII, the spacer sequence is a sequence from Table 6.

[0017] In another embodiment of the fusion protein composition, the invention provides an isolated fusion protein of formula IV:

(A1)-(XTEN)ᵤ-(A2)-(XTEN)ᵥ-(B)-(XTEN)_{w}-(A3)-(XTEN)ₓ-(C1)-(XTEN)_{y}-(C2) IV

wherein independently for each occurrence, A1 is an A1 domain of FVIII; A2 is an A2 domain of FVIII; A3 is an A3 domain of FVIII; B is a B domain of FVIII which can be a fragment or a splice variant of the B domain; C1 is a C1 domain of FVIII; C2 is a C2 domain of FVIII; u is either 0 or 1; v is either 0 or 1; x is either 0 or 1; y is either 0 or 1 with the proviso that u+v+w+x+y≧1; and XTEN is an extended recombinant polypeptide as described herein, e.g., as for formula I, and wherein the fusion protein comprises at least two XTENs, the XTENs are identical or different and the cumulative length of the XTENs is between about 100 to about 3000, or between 200 to about 2000, or between 400 to about 1000 amino acid residues.

[0018] In another embodiment of the fusion protein composition, the invention provides an isolated fusion protein of formula V:

(XTEN)ₜ-(S)ₐ-(A1)-(S)_{b}-(XTEN)ᵤ-(S)_{b}-(A2)-(S)_{c}-(XTEN)ᵥ-(S)_{c}-(B)-(S)_{d}-(XTEN)_{w}-(S)_{d}-(A3)-(S)ₑ-(XTEN)ₓ-(S)ₑ-(C1)-(S)_{f}-(XTEN)_{y}-(S)_{f}-(C2)-(S)_{g}-(XTEN)_{z} V

wherein independently for each occurrence, A1 is an A1 domain of FVIII; A2 is an A2 domain of FVIII; A3 is an A3 domain of FVIII; B is a B domain of FVIII which can be a fragment or a splice variant of the B domain; C1 is a C1 domain of FVIII; C2 is a C2 domain of FVIII; S is a spacer sequence having between 1 to about 50 amino acid residues that can optionally include a cleavage sequence from Table 7 or amino acids compatible with restrictions sites wherein for each occurrence, if there is any, the sequence of the spacer can be the same or different; a is either 0 or 1; b is either 0 or 1; c is either 0 or 1; d is either 0 or 1; e is either 0 or 1; f is either 0 or 1; g is either 0 or 1; t is either 0 or 1; u is either 0 or 1; v is either 0 or 1; w is 0 or 1, x is either 0 or 1; y is either 0 or 1; z is either 0 or 1 with the proviso that t+u+v+w+x+y+z≧1; and XTEN is an extended recombinant polypeptide as described herein, e.g., as for formula I, and wherein the fusion protein comprises at least two XTENs, the XTENs are identical or different and the cumulative length of the XTENs is between about 100 to about 3000, or between 200 to about 2000, or between 400 to about 1000 amino acid residues. In another embodiment of the foregoing formula V, the fusion protein comprises at least two spacer sequences, each of which comprises a cleavage sequence that is cleavable by the same or different procoagulant proteases capable of cleaving one or more sequences selected from Table 7. In one embodiment of formula V, the spacer sequence is GPEGPS. In another embodiment of formula V, the spacer sequence is a sequence from Table 6.

[0019] In another embodiment of the CFXTEN composition, the invention provides an isolated fusion protein of formula VI:

(XTEN)ᵤ-(S)ₐ-(A1)-(S)_{b}-(XTEN)ᵥ-(S)_{b}-(A2)-(S)_{c}-(XTEN)_{w}-(S)_{c}-(A3)-(S)_{d}-(XTEN)ₓ-(S)_{d}-(C1)-(S)ₑ-(XTEN)_{y}-(S)ₑ-(C2)-(S)_{f}-(XTEN)_{z} VI

wherein independently for each occurrence, A1 is an A1 domain of FVIII; A2 is an A2 domain of FVIII; A3 is an A3 domain of FVIII; C1 is a C1 domain of FVIII; C2 is a C2 domain of FVIII; S is a spacer sequence having between 1 to about 50 amino acid residues that can optionally include a cleavage sequence from Table 7 or amino acids compatible with restrictions sites wherein for each occurrence, if there is any, the sequence of the spacer can be the same or different; a is either 0 or 1; b is either 0 or 1; c is either 0 or 1; d is either 0 or 1; e is either 0 or 1; f is either 0 or 1; u is either 0 or 1; v is either 0 or 1; w is 0 or 1, x is either 0 or 1; y is either 0 or 1; z is either 0 or 1 with the proviso that u+v+w+x+y+z≧1; and XTEN is an extended recombinant polypeptide as described herein, e.g., as for formula I, and wherein the fusion protein comprises at least two XTENs, the XTENs are identical or different and the cumulative length of the XTENs is between about 100 to about 3000, or between 200 to about 2000, or between 400 to about 1000 amino acid residues. In one embodiment of formula VI, the spacer sequence is GPEGPS. In another embodiment of formula VI, the spacer sequence is a sequence from Table 6.

[0020] In another embodiment of the CFXTEN composition, the invention provides an isolated fusion protein of formula VII:

(SP)-(XTEN)ₓ-(CS)ₓ-(S)ₓ-(FVIII_{—}1-745)-(S)_{y}-(XTEN)_{y}-(S)_{y}-(FVIII_{—}1640-2332)-(S)_{z}-(CS)_{z}-(XTEN)_{z} VIIa or

(SP)-(XTEN)ₓ-(CS)ₓ-(S)ₓ-(FVIII_{—}1-743)-(S)_{y}-(XTEN)_{y}-(S)_{y}-(FVIII_{—}1638-2332)-(S)_{z}-(CS)_{z}-(XTEN)_{z} VIIb

wherein independently for each occurrence, SP is a signal peptide with sequence MQIELSTCFFLCLLRFCFS, CS is a cleavage sequence listed in Table 7, S is a spacer sequence having between 1 to about 50 amino acid residues that can optionally include amino acids compatible with restrictions sites wherein for each occurrence, if there is any, the sequence of the spacer can be the same or different; “FVIII_{—}1-745” is residues 1-745 of Factor FVIII and “FVIII_{—}1640-2332” is residues 1640-2332 of FVIII, or “FVIII_{—}1-743” is residues 1-743 of Factor FVIII and “FVIII_{—}1638-2332” is residues 1638-2332 of FVIII; x is either 0 or 1, y is either 0 or 1, and z is either 0 or 1, wherein x+y+z>2; and XTEN is an extended recombinant polypeptide as described herein, e.g., as for formula I, and wherein the fusion protein comprises at least two XTENs, the XTENs are identical or different and the cumulative length of the XTENs is between about 100 to about 3000, or between 200 to about 2000, or between 400 to about 1000 amino acid residues. In one embodiment of formula VII, the spacer sequence is GPEGPS. In another embodiment of formula VII, the spacer sequence is a sequence from Table 6.

[0021] In another embodiment of the CFXTEN composition, the invention provides an isolated fusion protein of formula VIII:

(XTEN)ᵤ-(S)ₐ-(A1)-(S)_{b}-(XTEN)ᵥ-(S)_{b}-(A2)-(B1)-(S)_{c}-(XTEN)_{w}-(S)_{c}-(B2)-(A3)-(S)_{d}-(XTEN)ₓ-(S)_{d}-(C1)-(S)ₑ-(XTEN)_{y}-(S)ₑ-(C2)-(S)_{f}-(XTEN)_{z} FVIII

wherein independently for each occurrence, A1 is an A1 domain of FVIII; A2 is an A2 domain of FVIII; B1 is a fragment of the B domain that can have from residues to 740 to residues 745 (or alternatively from residues 741 to residues 743) of a native mature FVIII; B2 is a fragment of the B domain that can have from residues 1640 to 1689 (or alternatively from residues 1638 to 1648) of a native mature FVIII; A3 is an A3 domain of FVIII; C1 is a C1 domain of FVIII; C2 is a C2 domain of FVIII; S is a spacer sequence having between 1 to about 50 amino acid residues that can optionally include a cleavage sequence from Table 7 or amino acids compatible with restrictions sites, wherein for each occurrence, if there is any, the sequence of the spacer can be the same or different; a is either 0 or 1; b is either 0 or 1; c is either 0 or 1; d is either 0 or 1; e is either 0 or 1; f is either 0 or 1; u is either 0 or 1; v is either 0 or 1; w is 0 or 1, x is either 0 or 1; y is either 0 or 1; z is either 0 or 1 with the proviso that u+v+w+x+y+z≧1; and XTEN is an extended recombinant polypeptide wherein the XTEN comprises at least 36 to about 3000 amino acid residues, the sum of glycine (G), alanine (A), serine (S), threonine (T), glutamate (E) and proline (P) residues constitutes at least about 80%, or at least about 90%, or at least about 95%, or at least about 99% of the total amino acid residues of the XTEN; the XTEN is substantially non-repetitive such that (i) the XTEN contains no three contiguous amino acids that are identical unless the amino acids are serine; (ii) at least about 80%, or at least about 90%, or at least about 95%, or at least about 99% of the XTEN sequence consists of non-overlapping sequence motifs, each of the sequence motifs comprising about 9 to about 14, or about 12 amino acid residues consisting of four to six amino acids selected from glycine (G), alanine (A), serine (S), threonine (T), glutamate (E) and proline (P), wherein any two contiguous amino acid residues do not occur more than twice in each of the non-overlapping sequence motifs; or (iii) the XTEN sequence has a subsequence score of less than 10, the XTEN has greater than 90%, or greater than 95%, or greater than 99% random coil formation as determined by GOR algorithm; the XTEN has less than 2% alpha helices and 2% beta-sheets as determined by Chou-Fasman algorithm; and the XTEN lacks a predicted T-cell epitope when analyzed by TEPITOPE algorithm, wherein the TEPITOPE threshold score for said prediction by said algorithm has a threshold of −9. In one embodiment, the XTEN exhibits at least about 80%, or at least about 90%, or at least about 95%, or at least about 99% sequence identity to a sequence of comparable length from any one of Table 4, Table 9, Table 10, Table 11, Table 12, and Table 13, when optimally aligned, and wherein the fusion protein comprises at least two XTENs, the XTENs are identical or different and the cumulative length of the XTENs is between about 100 to about 3000, or between 200 to about 2000, or between 400 to about 1000 amino acid residues. In one embodiment of formula VIII, the spacer sequence is GPEGPS. In another embodiment of formula VIII, the spacer sequence is a sequence from Table 6.

[0022] The fusion protein compositions in the configurations of formulae I-VIII and any other configuration disclosed herein exhibit an increased apparent molecular weight as determined by size exclusion chromatography, compared to the actual molecular weight. In some embodiments the fusion protein comprising a FVIII and one or more XTEN exhibits an apparent molecular weight of at least about 200 kD, or at least about 400 kD, or at least about 500 kD, or at least about 700 kD, or at least about 1000 kD, or at least about 1400 kD, or at least about 1600 kD, or at least about 1800 kD, or at least about 2000 kD, while the actual molecular weight of the FVIII component of the fusion protein is about 150 kDa in the case of a FVIII BDD, is about 265 kDa for the mature form of full-length FVIII, and the actual molecular weight of the fusion protein for a FVIII BDD plus a single XTEN ranges from about 200 to about 270 kDa. Accordingly, the fusion proteins comprising one or more XTEN configured as formulae I-VIII have an apparent molecular weight that is about 1.3-fold greater, or about 2-fold greater, or about 3-fold greater or about 4-fold greater, or about 8-fold greater, or about 10-fold greater, or about 12-fold greater, or about 15-fold greater than the actual molecular weight of the fusion protein. Further, the isolated fusion proteins configured as formulae I-VIII exhibit an apparent molecular weight factor under physiologic conditions that is greater than about 1.3, or about 2, or about 3, or about 4, or about 5, or about 6, or about 7, or about 8, or about 10, or greater than about 15, as determined by size exclusion chromatography.

[0023] The fusion protein compositions of the embodiments and in the configurations of formulae I-VIII described herein are evaluated for retention of activity (including after cleavage of any incorporated XTEN-releasing cleavage sites) using any appropriate in vitro assay disclosed herein (e.g., the assays of Table 27 or the assays described in the Examples), to determine the suitability of the configuration for use as a therapeutic agent in the treatment of a coagulation-factor related disease, disorder or condition. In one embodiment, the CFXTEN fusion protein exhibits at least about 30%, or at least about 40%, or at least about 50%, or at least about 60%, or at least about 70%, or at least about 80%, or at least about 90% of the procoagulant activity compared to the FVIII not linked to XTEN. In another embodiment, the FVIII component released from the fusion protein by enzymatic cleavage of the incorporated cleavage sequence(s) linking the FVIII and XTEN components exhibits at least about 30%, or at least about 40%, or at least about 50%, or at least about 60%, or at least about 70%, or at least about 80%, or at least about 90% of the procoagulant activity compared to the FVIII not linked to XTEN.

[0024] In some embodiments, fusion proteins comprising FVIII and one or more XTEN and in one of the configurations of formulae I-VIII exhibit enhanced pharmacokinetic properties compared to FVIII not linked to XTEN, wherein the enhanced properties include but are not limited to longer terminal half-life, larger area under the curve, increased time in which the blood concentration remains within the therapeutic window, increased time between consecutive doses results in blood concentrations within the therapeutic window, and decreased dose in IU over time that can be administered compared to a FVIII not linked to XTEN, yet still result in a blood concentration above a threshold concentration needed for a procoagulant effect. In some embodiments, the terminal half-life of the fusion proteins of the embodiments, including but not limited to those configured according to formulae I-VIII, administered to a subject is increased at least about three-fold, or at least about four-fold, or at least about five-fold, or at least about six-fold, or at least about eight-fold, or at least about ten-fold, or at least about 20-fold, or at least about 40-fold, or at least about 60-fold or even higher as compared to FVIII not linked to XTEN and administered to a subject at a comparable dose. In other embodiments, the terminal half-life of the fusion protein and in one of the configurations of formulae I-VIII administered to a subject is at least about 12 h, or at least about 24 h, or at least about 48 h, or at least about 72 h, or at least about 96 h, or at least about 120 h, or at least about 144 h, or at least about 21 days or greater. In other embodiments, the enhanced pharmacokinetic property of the fusion proteins of the embodiments is the property of maintaining a circulating blood concentration of procoagulant fusion protein comprising FVIII to a subject in need thereof above a threshold concentration of 0.01 IU/ml, or 0.05 IU/ml, or 0.1 IU/ml, or 0.2 IU/ml, or 0.3 IU/ml, or 0.4 IU/ml or 0.5 IU/ml for a period that is at least about two fold, or at least about three-fold, or at least about four-fold, or at least about five-fold, or at least about six-fold, or at least about eight-fold, or at least about ten-fold, or at least about 20-fold, or at least about 40-fold, or at least about 60-fold longer compared to the corresponding FVIII not linked to XTEN and administered to a subject at a comparable dose. The increase in half-life and time spent above the threshold concentration permits less frequent dosing and decreased amounts of the fusion protein (in moles equivalent) that are administered to a subject, compared to the corresponding FVIII not linked to XTEN. In one embodiment, administration of a subject fusion protein to a subject using a therapeutically-effective dose regimen results in a gain in time of at least two-fold, or at least three-fold, or at least four-fold, or at least five-fold, or at least six-fold, or at least eight-fold, or at least 10-fold, or at least about 20-fold, or at least about 40-fold, or at least about 60-fold or higher between at least two consecutive Cₘₐₓ peaks and/or Cₘᵢₙ troughs for blood levels of the fusion protein compared to the corresponding FVIII not linked to the XTEN and administered using a comparable dose regimen to a subject.

[0025] In some embodiments, the XTEN enhances thermostability of FVIII when linked to the XTEN wherein the thermostability is ascertained by measuring the retention of biological activity after exposure to a temperature of about 37° C. for at least about 7 days of the biologically active protein in comparison to the biologically active protein not linked to the XTEN. In one embodiment of the foregoing, the retention of biological activity increases by at least about 50%, at least about 60%, at least about 70%, at least about 80%, at least about 90%, at least about 100%, or about 150%, at least about 200%, at least about 300%, or about 500% longer compared to the CF not linked to the XTEN.

[0026] In some embodiments, the subject compositions are configured to have reduced binding affinity for a clearance receptor in a subject as compared to the corresponding FVIII not linked to the XTEN. In one embodiment, the CFXTEN fusion protein exhibits binding affinity for a clearance receptor of the FVIII in the range of about 0.01%-30%, or about 0.1% to about 20%, or about 1% to about 15%, or about 2% to about 10% of the binding affinity of the corresponding FVIII not linked to the XTEN. In another embodiment, a fusion protein with reduced affinity for a clearance receptor has reduced active clearance and a corresponding increase in half-life of at least about 2-fold, or 3-fold, or at least 4-fold, or at least about 5-fold, or at least about 6-fold, or at least about 7-fold, or at least about 8-fold, or at least about 9-fold, or at least about 10-fold, or at least about 12-fold, or at least about 15-fold, or at least about 17-fold, or at least about 20-fold longer compared to the corresponding FVIII that is not linked to the XTEN.

[0027] In an embodiment, the invention provides an isolated fusion protein comprising FVIII and one or more XTEN wherein the fusion protein exhibits increased solubility of at least three-fold, or at least about four-fold, or at least about five-fold, or at least about six-fold, or at least about seven-fold, or at least about eight-fold, or at least about nine-fold, or at least about ten-fold, or at least about 15-fold, or at least a 20-fold, or at least 40-fold, or at least 60-fold at physiologic conditions compared to the FVIII not linked to XTEN.

[0028] The following are non-limiting embodiments of the invention:

Item 1. An isolated fusion protein comprising at least one extended recombinant polypeptide (XTEN), wherein said fusion protein having a structure of formula VIII:

(XTEN)u-(S)a-(A1)-(S)b-(XTEN)v-(S)b-(A2)-(B1)-(S)c—(XTEN)w-(S)c-(B2)-(A3)-(S)d-(XTEN)x-(S)d(C1)-(S)e-(XTEN)y-(S)e-(C2)-(S)f-(XTEN)z VIII

wherein independently for each occurrence,

[0029] a) A1 is an A1 domain of FVIII;

[0030] b) A2 is an A2 domain of FVIII;

[0031] c) B1 is a fragment of the N-terminal end of the B domain having amino acid residues from residue number 740 to about number 745 of a native FVIII sequence;

[0032] d) B2 is a fragment of the C-terminal end of the B domain having amino acid residues from about residue numbers 1640 to number 1689 of a native FVIII sequence;

[0033] e) A3 is an A3 domain of FVIII;

[0034] f) C1 is a C1 domain of FVIII;

[0035] g) C2 is a C2 domain of FVIII;

[0036] h) S is a spacer sequence having between 1 to about 50 amino acid residues that can optionally include a cleavage sequence or amino acids compatible with restrictions sites, wherein for each occurrence, if there is any, the sequence of the spacer can be the same or different;

[0037] i) a is either 0 or 1;

[0038] j) b is either 0 or 1;

[0039] k) c is either 0 or 1;

[0040] l) d is either 0 or 1;

[0041] m) e is either 0 or 1;

[0042] n) f is either 0 or 1;

[0043] o) u is either 0 or 1;

[0044] p) v is either 0 or 1;

[0045] q) w is 0 or 1;

[0046] r) x is either 0 or 1;

[0047] s) y is either 0 or 1;

[0048] t) z is either 0 or 1, with the proviso that u+v+w+x+y+z>1; and

wherein the at least one XTEN is characterized in that:

[0049] a. the XTEN comprises at least 36 amino acid residues;

[0050] b. the sum of glycine (G), alanine (A), serine (S), threonine (T), glutamate (E) and proline (P) residues constitutes more than about 80% of the total amino acid residues of the XTEN;

[0051] c. the XTEN is substantially non-repetitive such that (i) the XTEN contains no three contiguous amino acids that are identical unless the amino acids are serine; (ii) at least about 80% of the XTEN sequence consists of non-overlapping sequence motifs, each of the sequence motifs comprising about 9 to about 14 amino acid residues consisting of four to six amino acids selected from glycine (G), alanine (A), serine (S), threonine (T), glutamate (E) and proline (P), wherein any two contiguous amino acid residues do not occur more than twice in each of the non-overlapping sequence motifs; or (iii) the XTEN sequence has a subsequence score of less than 10;

[0052] d. the XTEN has greater than 90% random coil formation as determined by GOR algorithm;

[0053] e. the XTEN has less than 2% alpha helices and 2% beta-sheets as determined by Chou-Fasman algorithm;

[0054] f. the XTEN lacks a predicted T-cell epitope when analyzed by TEPITOPE algorithm, wherein the TEPITOPE threshold score for said prediction by said algorithm has a threshold of −9.

Item 2. The isolated fusion protein of item 1, comprising at least two XTENs, wherein the cumulative length of the XTENs is between about 100 to about 3000 amino acid residues.
Item 3. The isolated fusion protein of item 2, wherein each XTEN exhibits at least 90% sequence identity to a sequence of comparable length from any one of Table 4, Table 9, Table 10, Table 11, Table 12, and Table 13, when optimally aligned.
Item 4. The isolated fusion protein of any one of items 1-3, wherein the optional cleavage sequence(s) are cleavable by a mammalian protease selected from the group consisting of factor XIa, factor XIIa, kallikrein, factor VIIa, factor IXa, factor Xa, factor IIa (thrombin), Elastase-2, MMP-12, MMP13, MMP-17 and MMP-20, wherein upon cleavage of the cleavage sequences, at least one XTEN is cleaved from the fusion protein and the cleaved fusion protein exhibits an increase in procoagulant activity of at least about 30% compared to the uncleaved fusion protein.
Item 5. The isolated fusion protein of any one of items 1-4, wherein said fusion protein exhibits a prolonged in vitro half-life as compared to a corresponding factor VIII polypeptide lacking said XTEN.
Item 6. The isolated fusion protein of any one of items 1-5, wherein said fusion protein exhibits a terminal half-life longer than at least 48 hours when administered to a subject.
Item 7. An isolated fusion protein comprising a factor VIII polypeptide and at least one extended recombinant polypeptide (XTEN), wherein said factor VIII polypeptide comprises A1 domain, A2 domain, A3 domain, C1 domain, C2 domain and optionally all or a portion of B domain, and wherein said at least one XTEN is linked to said factor VIII polypeptide at (i) the C-terminus of said factor VIII polypeptide; (ii) within B domain of said factor VIII polypeptide if all or a portion of B domain is present; (iii) within the A1 domain of said factor VIII polypeptide; (iv) within the A2 domain of said factor VIII polypeptide; (v) within the A3 domain of said factor VIII polypeptide; (vi) within the C1 domain of said factor VIII polypeptide; or (vii) within the C2 domain of said factor VIII polypeptide; and wherein the XTEN is characterized in that:

[0055] a. the XTEN comprises at least 36 amino acid residues;

[0056] b. the sum of glycine (G), alanine (A), serine (S), threonine (T), glutamate (E) and proline (P) residues constitutes more than about 80% of the total amino acid residues of the XTEN;

[0057] c. the XTEN is substantially non-repetitive such that (i) the XTEN contains no three contiguous amino acids that are identical unless the amino acids are serine; (ii) at least about 80% of the XTEN sequence consists of non-overlapping sequence motifs, each of the sequence motifs comprising about 9 to about 14 amino acid residues consisting of four to six amino acids selected from glycine (G), alanine (A), serine (S), threonine (T), glutamate (E) and proline (P), wherein any two contiguous amino acid residues do not occur more than twice in each of the non-overlapping sequence motifs; or (iii) the XTEN sequence has a subsequence score of less than 10;

[0058] d. the XTEN has greater than 90% random coil formation as determined by GOR algorithm;

[0059] e. the XTEN has less than 2% alpha helices and 2% beta-sheets as determined by Chou-Fasman algorithm;

[0060] f. the XTEN lacks a predicted T-cell epitope when analyzed by TEPITOPE algorithm, wherein the TEPITOPE threshold score for said prediction by said algorithm has a threshold of −9, and wherein said fusion protein exhibits a terminal half-life that is longer than about 48 hours when administered to a subject.

Item 8. The isolated fusion protein of item 7 comprising at least another XTEN linked to said factor VIII polypeptide at the C-terminus of said factor VIII polypeptide, and within the B domain of said factor VIII polypeptide.
Item 9. The isolated fusion protein of item 7 comprising a first XTEN sequence linked to said factor VIII polypeptide at the C-terminus of said factor VIII polypeptide, and at least a second XTEN within the B domain of said factor VIII polypeptide, wherein the second XTEN is linked to the C-terminal end of about amino acid residue number 740 to about 750 and to the N-terminal end of amino acid residue numbers 1640 to about 1689 of a native FVIII sequence, wherein the cumulative length of the XTEN is at least about 100 amino acid residues.
Item 10. The isolated fusion protein of item 7 comprising at least one XTEN sequence located within B domain of said factor VIII polypeptide.
Item 11. The isolated fusion protein of item 7 comprising at least a second XTEN, wherein said at least second XTEN is linked to said factor VIII polypeptide at one or more locations selected from:

[0061] a. an insertion location from Table 5;

[0062] b. a location between any two adjacent domains of said factor VIII polypeptide, wherein said two adjacent domains are selected from the group consisting of A1 and A2 domains, A2 and B domains, B and A3 domains, A3 and C1 domains, and C1 and C2 domains;

[0063] c. the N-terminus of said factor VIII polypeptide; and

[0064] d. the C-terminus of said factor VIII polypeptide,

Item 12. The isolated fusion protein of any one of items 8-11, the second XTEN having a sequence characterized in that:

[0065] a) the XTEN comprises at least 36 amino acid residues;

[0066] b) the sum of glycine (G), alanine (A), serine (S), threonine (T), glutamate (E) and proline (P) residues constitutes more than about 80% of the total amino acid residues of the XTEN;

[0067] c) the XTEN sequence is substantially non-repetitive such that (i) the XTEN contains no three contiguous amino acids that are identical unless the amino acids are serine; (ii) at least about 80% of the XTEN sequence consists of non-overlapping sequence motifs, each of the sequence motifs comprising about 9 to about 14 amino acid residues consisting of four to six amino acids selected from glycine (G), alanine (A), serine (S), threonine (T), glutamate (E) and proline (P), wherein any two contiguous amino acid residues does not occur more than twice in each of the sequence motifs; or (iii) the XTEN sequence has a subsequence score of less than 10;

[0068] d) the XTEN has greater than 90% random coil formation as determined by GOR algorithm;

[0069] e) the XTEN has less than 2% alpha helices and 2% beta-sheets as determined by Chou-Fasman algorithm; and

[0070] f) the XTEN lacks a predicted T-cell epitope when analyzed by TEPITOPE algorithm, wherein the TEPITOPE threshold score for said prediction by said algorithm has a threshold of −9.

Item 13. The isolated fusion protein of any one of preceding items, wherein the factor VIII polypeptide has at least 90% sequence identity compared to a sequence selected from Table 1, when optimally aligned.
Item 14. The isolated fusion protein of any one of preceding items, wherein the factor VIII polypeptide comprises human factor VIII.
Item 15. The isolated fusion protein of any one of preceding items, wherein the factor VIII polypeptide comprises a B-domain deleted variant of human factor VIII.
Item 16. The isolated fusion protein of item 11, wherein the XTEN is linked to the C-terminus of the factor VIII polypeptide.
Item 17. The isolated fusion protein of item 11, wherein the XTEN is linked to the N-terminus of the factor VIII polypeptide.
Item 18. The isolated fusion protein of any one of the preceding items, wherein the fusion protein exhibits an apparent molecular weight factor of at least about 2.
Item 19. The isolated fusion protein of any one of items 7-18, wherein the XTEN has at least 90% sequence identity compared to a sequence of comparable length selected from any one of Table 4, Table 9, Table 10, Table 11, Table 12, and Table 13, when optimally aligned.
Item 20. The isolated fusion protein of any one of items 7-18, wherein the factor VIII polypeptide is linked to the XTEN via one or two cleavage sequences that each is cleavable by a mammalian protease selected from the group consisting of factor XIa, factor XIIa, kallikrein, factor VIIa, factor IXa, factor Xa, factor IIa (thrombin), Elastase-2, MMP-12, MMP13, MMP-17 and MMP-20, wherein cleavage at the cleavage sequence by the mammalian protease releases the factor VIII sequence from the XTEN sequence, and wherein the released factor VIII sequence exhibits an increase in procoagulant activity of at least about 30% compared to the uncleaved fusion protein.
Item 21. The isolated fusion protein of item 20, wherein the cleavage sequence(s) are cleavable by factor XIa.
Item 22. The isolated fusion protein any one of items 7-21, comprising multiple XTENs located at different locations of the factor VIII polypeptide, wherein said different locations are selected from:

[0071] a. an insertion location from Table 5;

[0072] b. a location between any two adjacent domains in the factor VIII sequence, wherein said two adjacent domains are selected from the group consisting of A1 and A2, A2 and B, B and A3, A3 and C1, and C1 and C2;

[0073] c. the N-terminus of the factor VIII sequence; and

[0074] d. the C-terminus of the factor VIII sequence;

wherein the cumulative length of the multiple XTENs is at least about 100 to about 3000 amino acid residues.
Item 23. The isolated fusion protein of any one of items 7-22, wherein said fusion protein exhibits a prolonged in vitro half-life as compared to a corresponding factor VIII polypeptide lacking said XTEN.
Item 24. The isolated fusion protein of any one of items 7-23, wherein said fusion protein exhibits a terminal half-life longer than at least 48 hours when administered to a subject.
Item 25. A pharmaceutical composition comprising the fusion protein of any one of the preceding items and a pharmaceutically acceptable carrier.
Item 26. A method of treating a coagulopathy in a subject, comprising administering to said subject a composition comprising a therapeutically effective amount of the pharmaceutical composition of item 25.
Item 27. The method of item 26, wherein after said administration, a concentration of procoagulant factor VIII is maintained at about 0.05 IU/ml or more for at least 48 hours after said administration.
Item 28. The method of item 26, wherein said coagulopathy is hemophilia A.
Item 29. A method of treating a bleeding episode in a subject, comprising administering to said subject a composition comprising a therapeutically effective amount of the pharmaceutical composition of item 25, wherein the therapeutically effective amount of the fusion protein arrests a bleeding episode for a period that is at least three-fold longer compared to the corresponding factor VIII polypeptide lacking said at least one XTEN when said corresponding factor VIII is administered to a subject at a comparable dose. Item 30. A fusion protein used in the treatment of hemophilia A, comprising the fusion protein of any one of items 1-24.
Item 31. An isolated fusion protein comprising a polypeptide having at least 90% sequence identity compared to a sequence of comparable length selected from any one of Table 14, Table 28, Table 29 and Table 30.
Item 32. An isolated fusion protein comprising a factor VIII polypeptide and at least one extended recombinant polypeptide (XTEN), wherein said factor VIII polypeptide comprises A1 domain, A2 domain, A3 domain, and C1 domain, and wherein said at least one XTEN is linked to said factor VIII polypeptide at one or more insertion locations selected from the group consisting of:

[0075] a. the C-terminus of said factor VIII polypeptide;

[0076] b. within the A1 domain of said factor VIII polypeptide;

[0077] c. within the A2 domain of said factor VIII polypeptide;

[0078] d. within the A3 domain of said factor VIII polypeptide;

[0079] e. within the C1 domain of said factor VIII polypeptide;

[0080] f. one or more location between any two adjacent domains of said factor VIII polypeptide,

[0081] g. the N-terminus of said factor VIII polypeptide;

[0082] h. one or more location from FIG. 5;

[0083] i. one or more insertion location from Table 5; and

[0084] wherein the at least one XTEN is characterized in that:

[0085] i. the XTEN comprises at least 36 amino acid residues;

[0086] ii. the sum of glycine (G), alanine (A), serine (S), threonine (T), glutamate (E) and proline (P) residues constitutes more than about 80% of the total amino acid residues of the XTEN;

[0087] iii. the XTEN is substantially non-repetitive such that (i) the XTEN contains no three contiguous amino acids that are identical unless the amino acids are serine; (ii) at least about 80% of the XTEN sequence consists of non-overlapping sequence motifs, each of the sequence motifs comprising about 9 to about 14 amino acid residues consisting of four to six amino acids selected from glycine (G), alanine (A), serine (S), threonine (T), glutamate (E) and proline (P), wherein any two contiguous amino acid residues do not occur more than twice in each of the non-overlapping sequence motifs; or (iii) the XTEN sequence has a subsequence score of less than 10;

[0088] iv. the XTEN has greater than 90% random coil formation as determined by GOR algorithm;

[0089] v. the XTEN has less than 2% alpha helices and 2% beta-sheets as determined by Chou-Fasman algorithm; and

[0090] vi. the XTEN lacks a predicted T-cell epitope when analyzed by TEPITOPE algorithm,

[0091] wherein the TEPITOPE threshold score for said prediction by said algorithm has a threshold of −9.

Item 33. An isolated fusion protein comprising a factor VIII polypeptide and at least one extended recombinant polypeptide (XTEN), wherein said factor VIII polypeptide comprises A1 domain, A2 domain, A3 domain, and C1 domain, and wherein said at least one XTEN is linked to said factor VIII polypeptide at one or more insertion locations from table 25 and is characterized in that:

[0092] i. the XTEN comprises at least 36 amino acid residues;

[0093] ii. the sum of glycine (G), alanine (A), serine (S), threonine (T), glutamate (E) and proline (P) residues constitutes more than about 80% of the total amino acid residues of the XTEN;

[0094] iii. the XTEN is substantially non-repetitive such that (i) the XTEN contains no three contiguous amino acids that are identical unless the amino acids are serine; (ii) at least about 80% of the XTEN sequence consists of non-overlapping sequence motifs, each of the sequence motifs comprising about 9 to about 14 amino acid residues consisting of four to six amino acids selected from glycine (G), alanine (A), serine (S), threonine (T), glutamate (E) and proline (P), wherein any two contiguous amino acid residues do not occur more than twice in each of the non-overlapping sequence motifs; or (iii) the XTEN sequence has a subsequence score of less than 10;

[0095] iv. the XTEN has greater than 90% random coil formation as determined by GOR algorithm;

[0096] v. the XTEN has less than 2% alpha helices and 2% beta-sheets as determined by Chou-Fasman algorithm; and

[0097] vi. the XTEN lacks a predicted T-cell epitope when analyzed by TEPITOPE algorithm,

[0098] wherein the TEPITOPE threshold score for said prediction by said algorithm has a threshold of −9.

Item 34. The fusion protein of item 32 or 33, wherein said two adjacent domains are selected from the group consisting of the A1 and A2 domains, the A2 and A3 domains, and the A3 and C1 domains.
Item 35. The fusion protein of any one of items 32 to 34, wherein said factor VIII polypeptide further comprises C2 domain.
Item 36. The fusion protein of item 35, wherein at least one XTEN is inserted within the C2 domain, N-terminus of the C2 domain, C-terminus of the C2 domain, or a combination thereof.
Item 37. The fusion protein of any one of items 32 to 36, wherein said Factor VIII comprises a full-length B domain or a partially deleted B domain.
Item 38. The fusion protein of item 37, wherein at least one XTEN is inserted within the full-length B domain or partially deleted B domain, N-terminus of the full-length B domain or partially deleted B domain, C-terminus of the full-length B domain or partially deleted B domain, or a combination thereof.
Item 39. The fusion protein of any one of items 32 to 38, wherein said A3 domain comprises an a3 acidic region or a portion thereof.
Item 40. The fusion protein of item 27, wherein at least one XTEN is inserted within the a3 acidic region or the portion thereof, N-terminus of the a3 acidic region or the portion thereof, C-terminus of the a3 acidic region or the portion thereof, or a combination thereof.
Item 41. The fusion protein of any one of items 32 to 40, further comprising one or more spacer linked to said at least one XTEN.
Item 42. The fusion protein of item 41, wherein said spacer comprises about 1 to about 50 amino acid residues that optionally includes a cleavage sequence or amino acids compatible with restriction sites, wherein for each occurrence, if there is any, the sequence of the spacer is the same or different.
Item 43. An isolated fusion protein comprising a structure of formula (A):

(XTEN)v-(S)a-(A1)-(S)b-(XTEN)w-(S)b-(A2)-(S)c-(XTEN)x-(S)c-(A3)-(S)d-(XTEN)_{y}-(S)d-(C1)-(S)e-(XTEN)z (A)

[0099] wherein independently for each occurrence,

[0100] u) A1 is an A1 domain of FVIII;

[0101] v) A2 is an A2 domain of FVIII;

[0102] w) A3 is an A3 domain of FVIII;

[0103] x) C1 is a C1 domain of FVIII;

[0104] y) S is a spacer sequence having between 1 to about 50 amino acid residues that optionally includes a cleavage sequence or amino acids compatible with restrictions sites, wherein for each occurrence, if there is any, the sequence of the spacer is the same or different;

wherein

[0105] (i) a is either 0 or 1;

[0106] (ii) b is either 0 or 1;

[0107] (iii) c is either 0 or 1;

[0108] (iv) d is either 0 or 1;

[0109] (v) e is either 0 or 1;

[0110] (vi) v is either 0 or 1;

[0111] (vii) w is 0 or 1;

[0112] (viii) x is either 0 or 1;

[0113] (ix) y is either 0 or 1;

[0114] (x) z is either 0 or 1,

with the proviso that v+w+x+y+z>1,
wherein said XTEN is characterized in that:

[0115] (1). the XTEN comprises at least 36 amino acid residues;

[0116] (2). the sum of glycine (G), alanine (A), serine (S), threonine (T), glutamate (E) and proline (P) residues constitutes more than about 80% of the total amino acid residues of the XTEN;

[0117] (3). the XTEN is substantially non-repetitive such that (i) the XTEN contains no three contiguous amino acids that are identical unless the amino acids are serine; (ii) at least about 80% of the XTEN sequence consists of non-overlapping sequence motifs, each of the sequence motifs comprising about 9 to about 14 amino acid residues consisting of four to six amino acids selected from glycine (G), alanine (A), serine (S), threonine (T), glutamate (E) and proline (P), wherein any two contiguous amino acid residues do not occur more than twice in each of the non-overlapping sequence motifs; or (iii) the XTEN sequence has a subsequence score of less than 10;

[0118] (4). the XTEN has greater than 90% random coil formation as determined by GOR algorithm;

[0119] (5). the XTEN has less than 2% alpha helices and 2% beta-sheets as determined by Chou-Fasman algorithm; and

[0120] (6). the XTEN lacks a predicted T-cell epitope when analyzed by TEPITOPE algorithm, wherein the TEPITOPE threshold score for said prediction by said algorithm has a threshold of −9.

Item 44. The fusion protein of item 43, wherein said factor VIII polypeptide further comprises C2 domain.
Item 45. The fusion protein of item 44, wherein at least one XTEN is inserted within the C2 domain, N-terminus of the C2 domain, C-terminus of the C2 domain, or a combination thereof.
Item 46. The fusion protein of any one of items 43 to 45, wherein said Factor VIII comprises a full or a partially deleted B domain anywhere between the A2 and the A3.
Item 47. The fusion protein of item 46, wherein at least one XTEN is inserted within the full-length B domain or partially deleted B domain, N-terminus of the full-length B domain or partially deleted B domain, C-terminus of the full-length B domain or partially deleted B domain, or a combination thereof.
Item 48. The fusion protein of any one of items 43 to 47, wherein said A3 domain comprises an a3 acidic region or a portion thereof.
Item 49. The fusion protein of item 48, wherein at least one XTEN is inserted within the a3 acidic region or the portion thereof, N-terminus of the a3 acidic region or the portion thereof, C-terminus of the a3 acidic region or the portion thereof, or a combination thereof.
Item 50. The fusion protein of item 44, wherein at least one XTEN is further inserted within the A1, the A2, the A3, the C1, the C2, or a combination of two or more thereof.
Item 51. The fusion protein of any one of items 37-38 and 46-47, wherein said B domain comprises amino acid residues 741 to 743 of mature FVIII and/or amino acid residues 1638 to 1648 of mature FVIII.
Item 52. The fusion protein of any one of items 32 to 51, wherein said at least one XTEN is inserted right after Arginine at residue 1648 of mature FVIII.
Item 53. The fusion protein of any one of items 32 to 52, wherein said at least one XTEN is inserted in one or more thrombin cleavage site selected from the group consisting of amino acid residues 372 of FVIII, 740 of FVIII, and 1689 of FVIII.
Item 54. The fusion protein of any one of items 43 to 53, wherein the sum of v, w, x, y, and z, equals to 2, 3, 4, 5, 6, 7, 8, 9, or 10.
Item 55. The fusion protein of any one of items 32 to 54, wherein said factor VIII polypeptide comprises a heavy chain and a light chain, wherein said heavy chain comprises the A1 domain and the A2 domain, and said light chain comprises the A3 domain and the C1 domain.
Item 56. The fusion protein of item 55, wherein said heavy chain further comprises a partially deleted B domain and/or the light chain further comprises a partially deleted B domain.
Item 57. The fusion protein of any one of items 42-56, wherein the optional cleavage sequence(s) are cleavable by a mammalian protease selected from the group consisting of factor XIa, factor XIIa, kallikrein, factor VIIa, factor IXa, factor Xa, factor IIa (thrombin), Elastase-2, MMP-12, MMP13, MMP-17 and MMP-20, wherein upon cleavage of the cleavage sequences, at least one XTEN is cleaved from the fusion protein and the cleaved fusion protein exhibits an increase in procoagulant activity of at least about 30% compared to the uncleaved fusion protein.
Item 58. The fusion protein of any one of items 32 to 57, wherein one or more of said at least one XTEN is 36 amino acids, 42 amino acids, 144 amino acids, 288 amino acids, 576 amino acids, or 864 amino acids in length.
Item 59. The fusion protein of any one of items 32 to 57, wherein one or more of said at least one XTEN is selected from the group consisting of: XTEN_AE42, XTEN_AE864, XTEN_AE576, XTEN_AE288, XTEN_AE144, XTEN_AG864, XTEN_AG576, XTEN_AG288, and XTEN_AG144.
Item 60. The fusion protein of any one of items 32 to 59, which comprises at least two XTENs, wherein the cumulative length of the XTENs is between about 100 to about 3000 amino acid residues.
Item 61. The fusion protein of any one of items 32 to 60, wherein said fusion protein exhibits a prolonged in vitro half-life as compared to a corresponding factor VIII polypeptide lacking said XTEN.
Item 62. The fusion protein of any one of items 32-61, wherein said fusion protein exhibits a terminal half-life longer than at least 48 hours when administered to a subject.
Item 63. The fusion protein of any one of items 32 to 62, wherein a first XTEN of said at least one XTEN is linked to said factor VIII polypeptide at the C-terminus of said factor VIII polypeptide, and a second XTEN of said at least one XTEN is linked within the B domain of said factor VIII polypeptide.
Item 64. The fusion protein of item 63, wherein said second XTEN is linked between amino acid residue 743 and amino acid residue 1638 of mature FVIII.
Item 65. The fusion protein of item 63 or 64, wherein said first XTEN or said second XTEN has 36 amino acids, 42 amino acids, 144 amino acids, 288 amino acids, 576 amino acids, or 864 amino acids in length.
Item 66. The fusion protein of any one of items 63 to 65, wherein said first XTEN or said second XTEN is selected from the group consisting of: XTEN_AE42_{—}4, XTEN_AE864, XTEN_AE576, XTEN_AE288, XTEN_AE144, XTEN_AG864, XTEN_AG576, XTEN_AG288, and XTEN_AG144.
Item 67. The fusion protein of any one of the preceding items, wherein the cumulative length of the XTENs is at least about 100 amino acid residues.
Item 68. The fusion protein of any one of items 32 to 67, further comprising one or more XTEN linked to the factor VIII polypeptide at one or more locations selected from the group consisting of:

[0121] a. one or more insertion location from Table 5 or Table 25;

[0122] b. one or more insertion location from FIG. 5;

[0123] c. within the B domain of said factor VIII polypeptide;

[0124] d. within the A1 domain of said factor VIII polypeptide;

[0125] e. within the A2 domain of said factor VIII polypeptide;

[0126] f. within the a3 acidic region of said factor VIII polypeptide;

[0127] g. within the A3 domain of said factor VIII polypeptide;

[0128] h. within the C1 domain of said factor VIII polypeptide;

[0129] i. within the C2 domain of said factor VIII polypeptide;

[0130] j. one or more insertion location between any two adjacent domains of said factor VIII polypeptide, wherein said two adjacent domains are selected from the group consisting of A1 and A2 domains, A2 and B domains, B domain and a3 region, A2 domain and a3 region when B domain is completely deleted, a3 region and A3 domains, A3 and C1 domains, and C1 and C2 domains;

[0131] k. the N-terminus of said factor VIII polypeptide; and

[0132] l. the C-terminus of said factor VIII polypeptide.

Item 69. The fusion protein of any one of items 32 to 67, further comprising one or more XTEN linked to the factor VIII polypeptide at one or more locations from Table 25.
Item 70. The fusion protein item 68 or 69, wherein the one or more XTEN is characterized in that:

[0133] a. the XTEN comprises at least 36 amino acid residues;

[0134] b. the sum of glycine (G), alanine (A), serine (S), threonine (T), glutamate (E) and proline (P) residues constitutes more than about 80% of the total amino acid residues of the XTEN;

[0135] c. the XTEN sequence is substantially non-repetitive such that (i) the XTEN contains no three contiguous amino acids that are identical unless the amino acids are serine; (ii) at least about 80% of the XTEN sequence consists of non-overlapping sequence motifs, each of the sequence motifs comprising about 9 to about 14 amino acid residues consisting of four to six amino acids selected from glycine (G), alanine (A), serine (S), threonine (T), glutamate (E) and proline (P), wherein any two contiguous amino acid residues does not occur more than twice in each of the sequence motifs; or (iii) the XTEN sequence has a subsequence score of less than 10;

[0136] d. the XTEN has greater than 90% random coil formation as determined by GOR algorithm;

[0137] e. the XTEN has less than 2% alpha helices and 2% beta-sheets as determined by Chou-Fasman algorithm; and

[0138] f. the XTEN lacks a predicted T-cell epitope when analyzed by TEPITOPE algorithm, wherein the TEPITOPE threshold score for said prediction by said algorithm has a threshold of −9.

Item 71. The fusion protein of any one of items 68 to 70, wherein said one or more XTEN has 36 amino acids, 42 amino acids, 144 amino acids, 288 amino acids, 576 amino acids, or 864 amino acids in length.
Item 72. The fusion protein of any one of items 68 to 70, wherein said one or more XTEN is selected from the group consisting of: XTEN_AE42_{—}4, XTEN_AE864, XTEN_AE576, XTEN_AE288, XTEN_AE144, XTEN_AG864, XTEN_AG576, XTEN_AG288, and XTEN_AG144.
Item 73. The fusion protein of any one of the preceding items, wherein the factor VIII polypeptide has at least 90% sequence identity compared to a sequence selected from Table 1 or Table 31, when optimally aligned.
Item 74. The fusion protein of any one of the preceding items, wherein the factor VIII polypeptide comprises human factor VIII.
Item 75. The fusion protein of any one of the preceding items, wherein said at least one XTEN is linked to the C-terminus of the factor VIII polypeptide.
Item 76. The fusion protein of the any one of the preceding item, wherein said at least one XTEN is linked to the N-terminus of the factor VIII polypeptide.
Item 77. The fusion protein of the any one of the preceding items, wherein said at least one XTEN is linked to an insertion location from Table 25.
Item 78. The fusion protein of any one of the preceding items, wherein the fusion protein exhibits an apparent molecular weight factor of at least about 2.
Item 79. The fusion protein of any one of items the preceding items, wherein the XTEN has at least 90% sequence identity compared to a sequence of comparable length selected from any one of Table 4, Table 9, Table 10, Table 11, Table 12, and Table 13, when optimally aligned.
Item 80. The fusion protein of item 57, wherein the cleavage sequence(s) are cleavable by factor XIa.
Item 81. A pharmaceutical composition comprising the fusion protein of any one of the preceding items and a pharmaceutically acceptable carrier.
Item 82. A method of treating a coagulopathy in a subject, comprising administering to said subject a composition comprising a therapeutically effective amount of the pharmaceutical composition of item 81.
Item 83. The method of item 82, wherein after said administration, a concentration of procoagulant factor VIII is maintained at about 0.05 IU/ml or more for at least 48 hours after said administration.
Item 84. The method of item 82 or 83, wherein said coagulopathy is hemophilia A.
Item 85. A method of treating a bleeding episode in a subject, comprising administering to said subject a composition comprising a therapeutically effective amount of the pharmaceutical composition of item 82, wherein the therapeutically effective amount of the fusion protein arrests a bleeding episode for a period that is at least three-fold longer compared to the corresponding factor VIII polypeptide lacking said at least one XTEN when said corresponding factor VIII is administered to a subject at a comparable dose. Item 86. A fusion protein used in the treatment of hemophilia A, comprising the fusion protein of any one of items 1-85.

[0139] In some embodiments, the subject compositions exhibit enhanced pharmacokinetic properties characterized in that: (i) they have a longer half-life when administered to a subject compared to the corresponding FVIII coagulation factor not linked to the XTEN administered to a subject under an otherwise equivalent dose; (ii) when a smaller IU amount of the fusion protein is administered to a subject in comparison to the corresponding coagulation factor VIII that lacks the XTEN administered to a subject under an otherwise equivalent dose regimen, the fusion protein achieves a comparable area under the curve (AUC) as the corresponding FVIII not linked to the XTEN; (iii) when a smaller IU amount of the fusion protein is administered to a subject in comparison to the corresponding FVIII that lacks the XTEN administered to a subject under an otherwise equivalent dose regimen, the fusion protein achieves a comparable therapeutic effect as the corresponding coagulation factor VIII not linked to the XTEN; (iv) when the fusion protein is administered to a subject less frequently in comparison to the corresponding coagulation factor VIII not linked to the XTEN administered to a subject using an otherwise equivalent IU dose, the fusion protein achieves a comparable area under the curve (AUC) as the corresponding coagulation factor VIII not linked to the XTEN; (v) when the fusion protein is administered to a subject less frequently in comparison to the corresponding coagulation factor VIII not linked to the XTEN administered to a subject using an otherwise equivalent IU dose, the fusion protein achieves a comparable therapeutic effect as the corresponding coagulation factor VIII not linked to the XTEN; (vi) when an accumulatively smaller IU amount of the fusion protein is administered to a subject in comparison to the corresponding coagulation factor not linked to the XTEN administered to a subject under an otherwise equivalent dose period, the fusion protein achieves comparable area under the curve (AUC) as the corresponding coagulation factor FVIII not linked to the XTEN; or (vii) when an accumulatively smaller IU amount of the fusion protein is administered to a subject in comparison to the corresponding coagulation factor VIII not linked to the XTEN administered to a subject under an otherwise equivalent dose period, the fusion protein achieves comparable therapeutic effect as the corresponding coagulation factor not linked to the XTEN. The accumulative smaller IU amount is measured for a period of at least about one week, or about 14 days, or about 21 days, or about one month.

[0140] The present invention provides a method of producing a fusion protein comprising a factor VIII polypeptide fused to one or more extended recombinant polypeptides (XTEN), comprising: (a) providing a host cell comprising a recombinant polynucleotide molecule encoding the fusion protein; (b) culturing the host cell under conditions permitting the expression of the fusion protein; and (c) recovering the fusion protein from the culture. In one embodiment of the method, the factor VIII of the fusion protein has at least about 80%, or at least about 90%, or at least about 95%, or at least about 99% sequence identity compared to a sequence selected from Table 1 or Table 31 and the one or more XTEN of the expressed fusion protein has at least about 80%, or about 90%, or about 91%, or about 92%, or about 93%, or about 94%, or about 95%, or about 96%, or about 97%, or about 98%, or about 99% to about 100% sequence identity compared to a sequence selected from Table 4 or Table 8 or Table 9 or Table 10 or Table 11 or Table 12. In one embodiment of the method, the host cell is a eukaryotic cell selected from CHO cell, BHK, HEK, COS, HEK-293 or COS-7. In another embodiment of the method, the isolated fusion protein is recovered from the host cell cytoplasm in substantially soluble form.

[0141] The present invention provides isolated nucleic acids comprising a polynucleotide sequence selected from (a) a polynucleotide encoding the fusion protein of any of the foregoing embodiments, or (b) the complement of the polynucleotide of (a). In one embodiment, the invention provides an isolated nucleic acid comprising (a) a polynucleotide sequence encoding a polypeptide sequence that has at least 80% sequence identity, or about 85%, or at least about 90%, or about 91%, or about 92%, or about 93%, or about 94%, or about 95%, or about 96%, or about 97%, or about 98%, or about 99% to about 100% sequence identity to a polypeptide of any one of Tables 14 and 28-30; or (b) the complement of the polynucleotide of (a). The invention provides expression vectors comprising the nucleic acid of any of the embodiments hereinabove described in this paragraph. In one embodiment, the expression vector of the foregoing further comprises a recombinant regulatory sequence operably linked to the polynucleotide sequence. In another embodiment, the polynucleotide sequence of the expression vectors of the foregoing is fused in frame to a polynucleotide encoding a secretion signal sequence, which can be a factor VIII native signal sequence. The invention provides a host cell that comprises an expression vector of any of the embodiments hereinabove described in this paragraph. In one embodiment, the host cell is a eukaryotic cell. In another embodiment, the host cell is a CHO cell. In another embodiment, the host cell is an HEK cell. In another embodiment, the host cell is a BHK cell. In another embodiment, the host cell is a COS-7 cell. In another embodiment, the host cell is a HEK293 cell.

[0142] Additionally, the present invention provides pharmaceutical compositions comprising the fusion protein of any of the foregoing embodiments described herein and a pharmaceutically acceptable carrier. The pharmaceutical composition can be administered by any suitable means, including parenterally, subcutaneously, intramuscularly, or intravenously. The invention further provides a method of treating a coagulopathy or a factor VIII-related disease, disorder or condition in a subject, comprising administering to the subject a therapeutically effective amount of the foregoing pharmaceutical composition wherein the administration resulted in an improvement of at least one parameter associated with a FVIII disease, disorder or condition wherein the improvement is greater or of longer duration than that obtained by administration of FVIII not linked to XTEN and administered at a comparable dose. Non-limiting examples of parameters include blood concentrations of FVIII, activated partial prothrombin (aPTT) assay time, one-stage or two-stage clotting assay time, delayed onset of a bleeding episode, chromogenic FVIII assay time, bleeding times, or thrombelastography (TEG or ROTEM) assays, among others known in the art. The factor VIII-related disease, disorder or condition includes hemophilia A, bleeding disorders (e.g., defective platelet function, thrombocytopenia or von Willebrand's disease), vascular injury, bleeding from trauma or surgery, bleeding due to anticoagulant therapy, bleeding due to liver disease, circulating antibodies to FVIII, and defects in factor VIII. In a preferred embodiment of the method of treatment, the coagulopathy is hemophilia A. In an embodiment of the method of treatment, the pharmaceutical compositions is administered to a subject in need thereof in an amount sufficient to control a bleeding episode. In another embodiment of the method of treatment, the pharmaceutical composition is administered to a subject in need thereof in an amount sufficient to increase the circulating FVIII procoagulant concentration to a threshold concentration greater than 0.01 IU/ml (1% of normal), or greater than 0.01-0.05 IU/ml (1%-5% of normal), or greater than 0.05 to about 0.40 IU/ml (>5%-<40% of normal). In the foregoing embodiment, the concentration is maintained at or above the threshold concentration for at least about 12 h, or at least about 24 h, or at least about 48 h, or at least about 72 h, or at least about 96 h, or at least about 120 h, or at least about 144 h, or at least about 168 h, or greater. In another embodiment of the method of treatment, the pharmaceutical compositions is administered to a subject with anti-FVIII antibodies. In one embodiment, wherein the pharmaceutical composition is administered at a therapeutically effective amount, the administration results in a gain in time spent before onset of a bleeding episode of at least two-fold longer than the corresponding FVIII not linked to the XTEN, or alternatively, at least three-fold, at least four-fold, or five-fold, or six-fold, or seven-fold, or eight-fold, or nine-fold, or at least 10-fold, or at least 20-fold longer than the corresponding FVIII not linked to XTEN and administered at a comparable dose to a subject. In another embodiment, the invention provides a method of treatment wherein the administration of a therapeutically effective amount of the pharmaceutical composition arrests a bleeding episode for a period that is at least two-fold longer, or at least three-fold longer, or at least four-fold longer, or at least five-fold longer compared to a composition comprising the corresponding factor VIII polypeptide lacking said at least one XTEN when said corresponding factor VIII composition is administered to a subject at a comparable dose.

[0143] In another embodiment, the present invention provides a method of treating a factor VIII-related disease, disorder or condition, comprising administering the pharmaceutical composition described above to a subject using multiple consecutive doses of the pharmaceutical composition administered using a therapeutically effective dose regimen wherein the administration results in the improvement of at least one parameter wherein the improvement is greater or of longer duration than that obtained by administration of FVIII not linked to XTEN and administered under a therapeutically effective dose regimen. In one embodiment of the foregoing, the therapeutically effective dose regimen can result in a gain in time of at least three-fold, or alternatively, at least four-fold, or five-fold, or six-fold, or seven-fold, or eight-fold, or nine-fold, or at least 10-fold, or at least 20-fold longer time between at least two consecutive Cₘₐₓ peaks and/or Cₘᵢₙ troughs for blood levels of the fusion protein compared to the corresponding CF of the fusion protein not linked to the fusion protein and administered at a comparable dose regimen to a subject. In another embodiment of the foregoing, the administration of the fusion protein results in improvement in at least one measured parameter of a factor VIII-related disease using less frequent dosing or a lower total dosage in IUs of the fusion protein of the pharmaceutical composition compared to the corresponding biologically active protein component(s) not linked to the XTEN and administered to a subject using a therapeutically effective regimen to a subject.

[0144] The invention provides an isolated fusion protein comprising factor VIII and one or more XTEN, as described herein, used in the treatment of a coagulopathy. In one embodiment, the coagulopathy is hemophilia A, In another embodiment, the coagulopathy is a bleeding disorder. In another embodiment, the coagulopathy is caused by surgical intervention.

[0145] In another embodiment, the present invention provides kits, comprising packaging material and at least a first container comprising the pharmaceutical composition of the foregoing embodiment and a sheet of instructions for the reconstitution and/or administration of the pharmaceutical compositions to a subject.

### INCORPORATION BY REFERENCE

[0146] All publications, patents, and patent applications mentioned in this specification are herein incorporated by reference to the same extent as if each individual publication, patent, or patent application was specifically and individually indicated to be incorporated by reference.

### BRIEF DESCRIPTION OF THE DRAWINGS

[0147] The features and advantages of the invention may be further explained by reference to the following detailed description and accompanying drawings that sets forth illustrative embodiments.

[0148] FIG. 1 shows a schematic representation of the FVIII architecture and spatial arrangement of the domains during processing and clotting, and is intended to represent both native FVIII and B domain deleted variants. The A1 domain ranges from residue 1 to 372 (numbering relative to the mature form of FVIII sequence NCBI Protein RefSeq NP_{—}000123), A2 domain ranges from residue 373 to 740, B domain ranges from residue 741 to 1648, A3 domain ranges from residue 1649 to 2019 (encompassing a3 acidic region), C12020 to 2172, C2 domain ranges from residue 2173 to 2332. BDD variants include deletions between the range 741 to 1648, leaving some or no remnant residues, with a non-limiting BDD remnant sequence being SFSQNPPVLKRHQR. FIG. 1A shows the domain architecture of a single chain FVIII prior to processing. Arrows indicate the sites at residues R372, R740, R1648, and R1689 that are cleaved in the processing and conversion of FVIII to FVIIIa. FIG. 1B shows the FVIII molecule that has been processed into the heterodimer by the cleavage at the R1648 residue, with the a3 acidic region of the A3 domain indicated on the N-terminus of the A3. FIG. 1C shows the FVIII molecule processed into the FVIIIa heterotrimer by the cleavage at the R372, R740, and R1689 residues.

[0149] FIG. 2 is a schematic of the coagulation cascade, showing the intrinsic and extrinsic arms leading to the common pathway.

[0150] FIG. 3 is a schematic of the logic flow chart of the algorithm SegScore. In the figure the following legend applies: i, j—counters used in the control loops that run through the entire sequence; HitCount—this variable is a counter that keeps track of how many times a subsequence encounters an identical subsequence in a block; SubSeqX—this variable holds the subsequence that is being checked for redundancy; SubSeqY—this variable holds the subsequence that the SubSeqX is checked against; BlockLen—this variable holds the user determined length of the block; SegLen—this variable holds the length of a segment. The program is hardcoded to generate scores for subsequences of lengths 3, 4, 5, 6, 7, 8, 9, and 10; Block—this variable holds a string of length BlockLen. The string is composed of letters from an input XTEN sequence and is determined by the position of the i counter; SubSeqList—this is a list that holds all of the generated subsequence scores.

[0151] FIG. 4 depicts the application of the algorithm SegScore to a hypothetical XTEN of 11 amino acids in order to determine the repetitiveness. An XTEN sequence consisting of N amino acids is divided into N−S+1 subsequences of length S(S=3 in this case). A pair-wise comparison of all subsequences is performed and the average number of identical subsequences is calculated to result in the subsequence score of 1.89.

[0152] FIG. 5 illustrates several examples of CFXTEN configurations of FVIII linked to XTEN (the latter shown as thick, wavy lines). In all cases, the FVIII can be either native or a BDD form of FVIII, or a single chain form in which the entire B domain, including the native cleavage sites are removed. FIG. 5A shows, left to right, three variations of single chain factor VIII with XTEN linked to the N-terminus, the C-terminus, and two XTEN linked to the N- and C-terminus FIG. 5B shows six variations of mature heterodimer FVIII with, left to right, an XTEN linked to the N-terminus of the A1 domain; an XTEN linked to the C-terminus of the C2 domain; an XTEN linked to the N-terminus of the A1 domain and the C-terminus of the C2 domain; an XTEN linked to the N-terminus of the A1 domain and to the N-terminus of the A3 domain; an XTEN linked to the C-terminus of the C2 domain and to the N-terminus of the A3 domain via residual B domain amino acids; and an XTEN linked to the N-terminus of the A1 domain, the C-terminus of the A2 domain via residual B domain amino acids, and to the C-terminus of the C2 domain.

[0153] FIG. 5C shows, left to right, three variations of single chain factor VIII: an XTEN linked to the N-terminus of the A1 domain, an XTEN linked within a surface loop of the A1 domain and an XTEN linked within a surface loop of the A3 domain; an XTEN linked within a surface loop of the A2 domain, an XTEN linked within a surface loop of the C2 domain and an XTEN linked to the C terminus of the C2 domain; an XTEN linked to the N-terminus of the A1 domain and within a surface loop of the C1 domain and to the C-terminus of the C domain. FIG. 5D shows six variations of mature heterodimer FVIII with, left to right, an XTEN linked to the N-terminus of the A1 domain, an XTEN linked within a surface loop of the A1 domain, and an XTEN linked within a surface loop of the A3 domain; an XTEN linked within a surface loop of the A2 domain, and an XTEN linked within a surface loop of the C1 domain, and an XTEN linked to the C-terminus of the C2 domain; an XTEN linked to the N-terminus of the A1 domain, an XTEN linked within a surface loop of the A1 domain, an XTEN linked within a surface loop of the A3 domain, and an XTEN linked to the C-terminus of the C2 domain; an XTEN linked to the N-terminus of the A1 domain, an XTEN linked to the N-terminus of the A3 domain via residual amino acids of the B domain, and an XTEN linked within a surface loop of the C2 domain; an XTEN linked within a surface loop of the A2 domain, an XTEN linked to the N-terminus of the A3 domain via residual amino acids of the B domain, an XTEN linked within a surface loop of the C1 domain, and an XTEN linked to the C-terminus of the C2 domain; and an XTEN linked within the B domain or between the residual B domain residues of the BDD variant (and the invention also contemplates a variation in which the XTEN replaces the entirety of the B domain, including all native cleavage sites, linking the A2 and A3 domains, resulting in a single chain form of factor VIII). This figure also embodies all variations in which one or more XTEN sequences are inserted within the B domain and the resulting fusions are cleaved at one or more sites (e.g., at R1648 site) during intracellular processing.

[0154] FIG. 6 is a graphic portrayal of the various analyses performed on a FVIII B-domain deleted sequence to identify insertion sites for XTEN within the FVIII sequence. Each of lines A-H are on an arbitrary scale of Y axis values across the FVIII BDD sequence such that low values represent areas with a high predicted tolerance for XTEN insertion, with the residue numbers on the X axis. Line A shows the domain boundaries; all discontinuities in this line represent boundaries that are likely to accept XTEN. Line B shows exon boundaries; i.e., each step in the line represents a new exon. Line C shown regions that were not visible in the X-ray structure due to a lack of order in the crystal. Lines labeled D represents multiple predictions of order that were calculated using the respective programs FoldIndex found on the World-Wide web site bip.weizmann.acil/fldbin/findex (last accessed Feb. 23, 2011) (see Jaime Prilusky, Clifford E. Felder, Tzviya Zeev-Ben-Mordehai, Edwin Rydberg, Orna Man, Jacques S. Beckmann, Israel Silman, and Joel L. Sussman, 2005, Bioinformatics based on the Kyte & Doolittle algorithm, as well as RONN found on the World-Wide web site strubi.ox.ac.uk/RONN (last accessed Feb. 23, 2011) (see Yang, Z. R., Thomson, R., McMeil, P. and Esnouf, R. M. (2005) RONN: the bio-basis function neural network technique applied to the detection of natively disordered regions in proteins Bioinformatics 21: 3369-3376. Lines E and F were calculated based on multiple sequence alignments of FVIII genes from 11 mammals available in GenBank. Line E represents the conservation of individual residues. Line F represent the conservation of 3 amino acid segments of FVIII. Lines G and H represent gaps and insertions observed in the multiple sequence alignment of 11 mammalian FVIII genes. Line J lists the XTEN insertion points by amino acid number that were obtained based by combining the multiple measurements above.

[0155] FIG. 7 depicts the sites in a FVIII B-domain deleted sequence identified for insertion of XTEN using the information depicted in FIG. 6 and or Example 34. The amino acids with a double underline correspond to the specific insertion points of Table 5 or Table 25, while the amino acids with a single underline correspond to the span of amino acids around each insertion point that is considered suitable for insertion of XTEN between any two adjoining amino acids within the depicted span.

[0156] FIG. 8 is a schematic of the assembly of a CFXTEN library created by identifying insertion points as described for FIG. 6 followed by insertion of single XTEN (black bars) at the various insertion points using molecular biology techniques. The constructs are expressed and recovered, then evaluated for FVIII activity and pharmacokinetic properties to identify those CFXTEN configurations that result in enhanced properties.

[0157] FIG. 9 is a schematic of the assembly of a CFXTEN component library in which segments of FVIII BDD domains, either singly or linked to various lengths of XTEN (black bars) are assembled in a combinatorial fashion into libraries of genes encoding the CFXTEN, which can then be evaluated for FVIII activity and pharmacokinetic properties to identify those CFXTEN configurations that result in enhanced properties.

[0158] FIG. 10 illustrates several examples of CFXTEN configurations with XTEN (shown as thick, wavy lines), with certain XTEN releasable by inserting cleavage sequences (indicated by black triangles) that are cleavable by procoagulant proteases. FIG. 10A illustrates a scFVIII with two terminal releasable XTENS. FIG. 10B illustrates the same configuration as FIG. 10A but with an additional non-releasable XTEN linking the A3 and C1 domains. FIG. 10C illustrates a mature heterodimer FVIII with two terminal releasable XTEN. FIG. 10D illustrates the same configuration as 10C but with an additional non-releasable XTEN linking the A3 and C1 domains.

[0159] FIG. 11 is a schematic flowchart of representative steps in the assembly, production and the evaluation of an XTEN.

[0160] FIG. 12 is a schematic flowchart of representative steps in the assembly of a CFXTEN polynucleotide construct encoding a fusion protein. Individual oligonucleotides 501 are annealed into sequence motifs 502 such as a 12 amino acid motif (“12-mer”), which is ligated to additional sequence motifs from a library to create a pool that encompasses the desired length of the XTEN 504, as well as ligated to a smaller concentration of an oligo containing BbsI, and KpnI restriction sites 503. The resulting pool of ligation products is gel-purified and the band with the desired length of XTEN is cut, resulting in an isolated XTEN gene with a stopper sequence 505. The XTEN gene is cloned into a stuffer vector. In this case, the vector encodes an optional CBD sequence 506 and a GFP gene 508. Digestion is then performed with BbsI/HindIII to remove 507 and 508 and place the stop codon. The resulting product is then cloned into a BsaI/HindIII digested vector containing a gene encoding the FVIII, resulting in the gene 500 encoding an FVIII-XTEN fusion protein.

[0161] FIG. 13 is a schematic flowchart of representative steps in the assembly of a gene encoding fusion protein comprising a CF and XTEN, its expression and recovery as a fusion protein, and its evaluation as a candidate CFXTEN product.

[0162] FIG. 14 illustrates the use of donor XTEN sequences to produce truncated XTENs. FIG. 14A provides the sequence of AG864, with the underlined sequence used to generate AG576. FIG. 14B provides the sequence of AG864, with the underlined sequence used to generate AG288. FIG. 14C provides the sequence of AG864, with the underlined sequence used to generate AG144. FIG. 14D provides the sequence of AE864, with the underlined sequence used to generate AE576. FIG. 14E provides the sequence of AE864, with the underlined sequence used to generate AE288.

[0163] FIG. 15 is a schematic representation of the design of Factor VIII-XTEN expression vectors with different strategies introducing XTEN elements into the FVIII coding sequence. FIG. 15A shows an expression vector encoding XTEN fused to the 3′ end of the sequence encoding FVIII. FIG. 15B depicts an expression vector encoding an XTEN element inserted into the middle of the coding sequence of FVIII. FIG. 15C depicts an expression vector encoding two XTEN elements: one inserted into the FVIII coding sequence, and the other fused to the 3′ end of the FVIII coding sequence.

[0164] FIG. 16 illustrates the process of combinatorial gene assembly of genes encoding XTEN. In this case, the genes are assembled from 6 base fragments and each fragment is available in 4 different codon versions (A, B, C and D). This allows for a theoretical diversity of 4096 in the assembly of a 12 amino acid motif.

[0165] FIG. 17 shows the pharmacokinetic profile (plasma concentrations) in cynomolgus monkeys after single doses of different compositions of GFP linked to unstructured polypeptides of varying length, administered either subcutaneously or intravenously, as described in Example 28. The compositions were GFP-L288, GFP-L576, GFP-XTEN_AF576, GFP-Y576 and XTEN_AD836-GFP. Blood samples were analyzed at various times after injection and the concentration of GFP in plasma was measured by ELISA using a polyclonal antibody against GFP for capture and a biotinylated preparation of the same polyclonal antibody for detection. Results are presented as the plasma concentration versus time (h) after dosing and show, in particular, a considerable increase in half-life for the XTEN_AD836-GFP, the composition with the longest sequence length of XTEN. The construct with the shortest sequence length, the GFP-L288 had the shortest half-life.

[0166] FIG. 18 shows an SDS-PAGE gel of samples from a stability study of the fusion protein of XTEN_AE864 fused to the N-terminus of GFP (see Example 29). The GFP-XTEN was incubated in cynomolgus plasma and rat kidney lysate for up to 7 days at 37° C. In addition, GFP-XTEN administered to cynomolgus monkeys was also assessed. Samples were withdrawn at 0, 1 and 7 days and analyzed by SDS PAGE followed by detection using Western analysis with antibodies against GFP.

[0167] FIG. 19 shows results of a size exclusion chromatography analysis of glucagon-XTEN construct samples measured against protein standards of known molecular weight, with the graph output as absorbance versus retention volume, as described in Example 27. The glucagon-XTEN constructs are 1) glucagon-Y288; 2) glucagonY-144; 3) glucagon-Y72; and 4) glucagon-Y36. The results indicate an increase in apparent molecular weight with increasing length of XTEN moiety (see Example 27 for data).

[0168] FIG. 20 shows results of a Western blot of proteins expressed by cell culture of cells transformed with constructs as designated. The samples in lanes 1-12 were: MW Standards, FVIII (42.5 ng), pBC0100B, pBC0114A, pBC0100, pBC0114, pBC0135, pBC0136, pBC0137, pBC0145, pBC0149, and pBC0146, respectively. Lanes 8, 9 and 12 show bands consistent with a FVIII with a C-terminal XTEN288, with an estimated MW of 95 kDa. Lanes 7 and 11 show bands consistent with a FVIII with a C-terminal XTEN42, with an estimated MW of 175 kDa. Lanes 2-6 show bands consistent with FVIII and heavy chain. Lanes 10 and 23 show bands consistent with heavy chain. Lane 7 shows a band consistent with heavy chain and an attached XTEN42.

[0169] FIG. 21 shows the results of FVIII assay on samples obtained from FVIII and von Willebrand factor double knock-out mice with hydrodynamic plasmid DNA injection, as detailed in Example 35,

### DETAILED DESCRIPTION OF THE INVENTION

[0170] Before the embodiments of the invention are described, it is to be understood that such embodiments are provided by way of example only, and that various alternatives to the embodiments of the invention described herein may be employed in practicing the invention. Numerous variations, changes, and substitutions will now occur to those skilled in the art without departing from the invention.

[0171] Unless otherwise defined, all technical and scientific terms used herein have the same meaning as commonly understood by one of ordinary skill in the art to which this invention belongs. Although methods and materials similar or equivalent to those described herein can be used in the practice or testing of the present invention, suitable methods and materials are described below. In case of conflict, the patent specification, including definitions, will control. In addition, the materials, methods, and examples are illustrative only and not intended to be limiting. Numerous variations, changes, and substitutions will now occur to those skilled in the art without departing from the invention.

### DEFINITIONS

[0172] In the context of the present application, the following terms have the meanings ascribed to them unless specified otherwise:

[0173] As used in the specification and claims, the singular forms “a”, “an” and “the” include plural references unless the context clearly dictates otherwise. For example, the term “a cell” includes a plurality of cells, including mixtures thereof.

[0174] The terms “polypeptide”, “peptide”, and “protein” are used interchangeably herein to refer to polymers of amino acids of any length. The polymer may be linear or branched, it may comprise modified amino acids, and it may be interrupted by non-amino acids. The terms also encompass an amino acid polymer that has been modified, for example, by disulfide bond formation, glycosylation, lipidation, acetylation, phosphorylation, or any other manipulation, such as conjugation with a labeling component.

[0175] The term “amino acid” refers to either natural and/or unnatural or synthetic amino acids, including but not limited to both the D or L optical isomers, and amino acid analogs and peptidomimetics. Standard single or three letter codes are used to designate amino acids.

[0176] The term “domain,” when used in reference to a factor VIII polypeptide refers to either a full length domain or a functional fragment thereof, for example, full length or functional fragments of the A1 domain, A2 domain, A3 domain, a3 domain, B domain, C1 domain, and/or C2 domain of factor VIII.

[0177] The term “natural L-amino acid” means the L optical isomer forms of glycine (G), proline (P), alanine (A), valine (V), leucine (L), isoleucine (I), methionine (M), cysteine (C), phenylalanine (F), tyrosine (Y), tryptophan (W), histidine (H), lysine (K), arginine (R), glutamine (Q), asparagine (N), glutamic acid (E), aspartic acid (D), serine (S), and threonine (T).

[0178] The term “non-naturally occurring,” as applied to sequences and as used herein, means polypeptide or polynucleotide sequences that do not have a counterpart to, are not complementary to, or do not have a high degree of homology with a wild-type or naturally-occurring sequence found in a mammal. For example, a non-naturally occurring polypeptide or fragment may share no more than 99%, 98%, 95%, 90%, 80%, 70%, 60%, 50% or even less amino acid sequence identity as compared to a natural sequence when suitably aligned.

[0179] The terms “hydrophilic” and “hydrophobic” refer to the degree of affinity that a substance has with water. A hydrophilic substance has a strong affinity for water, tending to dissolve in, mix with, or be wetted by water, while a hydrophobic substance substantially lacks affinity for water, tending to repel and not absorb water and tending not to dissolve in or mix with or be wetted by water Amino acids can be characterized based on their hydrophobicity. A number of scales have been developed. An example is a scale developed by Levitt, M, et al., J Mol Biol (1976) 104:59, which is listed in Hopp, T P, et al., Proc Natl Acad Sci USA (1981) 78:3824. Examples of “hydrophilic amino acids” are arginine, lysine, threonine, alanine, asparagine, and glutamine. Of particular interest are the hydrophilic amino acids aspartate, glutamate, and serine, and glycine. Examples of “hydrophobic amino acids” are tryptophan, tyrosine, phenylalanine, methionine, leucine, isoleucine, and valine.

[0180] A “fragment” when applied to a protein, is a truncated form of a native biologically active protein that retains at least a portion of the therapeutic and/or biological activity. A “variant”. when applied to a protein is a protein with sequence homology to the native biologically active protein that retains at least a portion of the therapeutic and/or biological activity of the biologically active protein. For example, a variant protein may share at least 70%, 75%, 80%, 85%, 90%, 95%, 96%, 97%, 98% or 99% amino acid sequence identity compared with the reference biologically active protein. As used herein, the term “biologically active protein moiety” includes proteins modified deliberately, as for example, by site directed mutagenesis, synthesis of the encoding gene, insertions, or accidentally through mutations.

[0181] The term “sequence variant” means polypeptides that have been modified compared to their native or original sequence by one or more amino acid insertions, deletions, or substitutions. Insertions may be located at either or both termini of the protein, and/or may be positioned within internal regions of the amino acid sequence. A non-limiting example is insertion of an XTEN sequence within the sequence of the biologically-active payload protein. In deletion variants, one or more amino acid residues in a polypeptide as described herein are removed. Deletion variants, therefore, include all fragments of a payload polypeptide sequence. In substitution variants, one or more amino acid residues of a polypeptide are removed and replaced with alternative residues. In one aspect, the substitutions are conservative in nature and conservative substitutions of this type are well known in the art.

[0182] As used herein, “internal XTEN” refers to XTEN sequences that have been inserted into the sequence of the coagulation factor. Internal XTENs can be constructed by insertion of an XTEN sequence into the sequence of a coagulation factor such as FVIII, either by insertion between two adjacent amino acids or between two domains of the coagulation factor or wherein XTEN replaces a partial, internal sequence of the coagulation factor.

[0183] As used herein, “terminal XTEN” refers to XTEN sequences that have been fused to or in the N- or C-terminus of the coagulation factor or to a proteolytic cleavage sequence or linker at the N- or C-terminus of the coagulation factor. Terminal XTENs can be fused to the native termini of the coagulation factor. Alternatively, terminal XTENs can replace a terminal sequence of the coagulation factor.

[0184] The term “XTEN release site” refers to a cleavage sequence in CFXTEN fusion proteins that can be recognized and cleaved by a mammalian protease, effecting release of an XTEN or a portion of an XTEN from the CFXTEN fusion protein. As used herein, “mammalian protease” means a protease that normally exists in the body fluids, cells or tissues of a mammal. XTEN release sites can be engineered to be cleaved by various mammalian proteases (a.k.a. “XTEN release proteases”) such as FXIa, FXIIa, kallikrein, FVIIIa, FVIIIa, FXa, FIIa (thrombin), Elastase-2, MMP-12, MMP13, MMP-17, MMP-20, or any protease that is present during a clotting event. Other equivalent proteases (endogenous or exogenous) that are capable of recognizing a defined cleavage site can be utilized. The cleavage sites can be adjusted and tailored to the protease utilized.

[0185] “Activity” as applied to form(s) of a CFXTEN polypeptide provided herein, refers to retention of a procoagulant activity with reference to a native FVIII coagulation factor derived from human plasma, whereas “biological activity” refers to an in vitro or in vivo biological function or effect, including but not limited to either receptor or ligand binding, or an effect on coagulation generally known in the art for the FVIII coagulation factor, or a cellular, physiologic, or clinical response, including arrest of a bleeding episode.

[0186] A “host cell” includes an individual cell or cell culture which can be or has been a recipient for the subject vectors. Host cells include progeny of a single host cell. The progeny may not necessarily be completely identical (in morphology or in genomic of total DNA complement) to the original parent cell due to natural, accidental, or deliberate mutation. A host cell includes cells transfected in vivo with a vector of this invention.

[0187] “Isolated” when used to describe the various polypeptides disclosed herein, means polypeptide that has been identified and separated and/or recovered from a component of its natural environment. Contaminant components of its natural environment are materials that would typically interfere with diagnostic or therapeutic uses for the polypeptide, and may include enzymes, hormones, and other proteinaceous or non-proteinaceous solutes. As is apparent to those of skill in the art, a non-naturally occurring polynucleotide, peptide, polypeptide, protein, antibody, or fragments thereof, does not require “isolation” to distinguish it from its naturally occurring counterpart. In addition, a “concentrated”, “separated” or “diluted” polynucleotide, peptide, polypeptide, protein, antibody, or fragments thereof, is distinguishable from its naturally occurring counterpart in that the concentration or number of molecules per volume is generally greater than that of its naturally occurring counterpart. In general, a polypeptide made by recombinant means and expressed in a host cell is considered to be “isolated.”

[0188] An “isolated” polynucleotide or polypeptide-encoding nucleic acid or other polypeptide-encoding nucleic acid is a nucleic acid molecule that is identified and separated from at least one contaminant nucleic acid molecule with which it is ordinarily associated in the natural source of the polypeptide-encoding nucleic acid. An isolated polypeptide-encoding nucleic acid molecule is other than in the form or setting in which it is found in nature. Isolated polypeptide-encoding nucleic acid molecules therefore are distinguished from the specific polypeptide-encoding nucleic acid molecule as it exists in natural cells. However, an isolated polypeptide-encoding nucleic acid molecule includes polypeptide-encoding nucleic acid molecules contained in cells that ordinarily express the polypeptide where, for example, the nucleic acid molecule is in a chromosomal or extra-chromosomal location different from that of natural cells.

[0189] A “chimeric” protein contains at least one fusion polypeptide comprising at least one region in a different position in the sequence than that which occurs in nature. The regions may normally exist in separate proteins and are brought together in the fusion polypeptide; or they may normally exist in the same protein but are placed in a new arrangement in the fusion polypeptide. A chimeric protein may be created, for example, by chemical synthesis, or by creating and translating a polynucleotide in which the peptide regions are encoded in the desired relationship.

[0190] “Conjugated”, “linked,” “fused,” and “fusion” are used interchangeably herein. These terms refer to the joining together of two or more chemical elements, sequences or components, by whatever means including chemical conjugation or recombinant means. For example, a promoter or enhancer is operably linked to a coding sequence if it affects the transcription of the sequence. Generally, “operably linked” means that the DNA sequences being linked are contiguous, and in reading phase or in-frame. An “in-frame fusion” refers to the joining of two or more open reading frames (ORFs) to form a continuous longer ORF, in a manner that maintains the correct reading frame of the original ORFs. Thus, the resulting recombinant fusion protein is a single protein containing two or more segments that correspond to polypeptides encoded by the original ORFs (which segments are not normally so joined in nature).

[0191] In the context of polypeptides, a “linear sequence” or a “sequence” is an order of amino acids in a polypeptide in an amino to carboxyl terminus direction in which residues that neighbor each other in the sequence are contiguous in the primary structure of the polypeptide. A “partial sequence” is a linear sequence of part of a polypeptide that is known to comprise additional residues in one or both directions.

[0192] “Heterologous” means derived from a genotypically distinct entity from the rest of the entity to which it is being compared. For example, a glycine rich sequence removed from its native coding sequence and operatively linked to a coding sequence other than the native sequence is a heterologous glycine rich sequence. The term “heterologous” as applied to a polynucleotide, a polypeptide, means that the polynucleotide or polypeptide is derived from a genotypically distinct entity from that of the rest of the entity to which it is being compared.

[0193] The terms “polynucleotides”, “nucleic acids”, “nucleotides” and “oligonucleotides” are used interchangeably. They refer to a polymeric form of nucleotides of any length, either deoxyribonucleotides or ribonucleotides, or analogs thereof. Polynucleotides may have any three-dimensional structure, and may perform any function, known or unknown. The following are non-limiting examples of polynucleotides: coding or non-coding regions of a gene or gene fragment, loci (locus) defined from linkage analysis, exons, introns, messenger RNA (mRNA), transfer RNA, ribosomal RNA, ribozymes, cDNA, recombinant polynucleotides, branched polynucleotides, plasmids, vectors, isolated DNA of any sequence, isolated RNA of any sequence, nucleic acid probes, and primers. A polynucleotide may comprise modified nucleotides, such as methylated nucleotides and nucleotide analogs. If present, modifications to the nucleotide structure may be imparted before or after assembly of the polymer. The sequence of nucleotides may be interrupted by non-nucleotide components. A polynucleotide may be further modified after polymerization, such as by conjugation with a labeling component.

[0194] The term “complement of a polynucleotide” denotes a polynucleotide molecule having a complementary base sequence and reverse orientation as compared to a reference sequence, such that it could hybridize with a reference sequence with complete fidelity.

[0195] “Recombinant” as applied to a polynucleotide means that the polynucleotide is the product of various combinations of in vitro cloning, restriction and/or ligation steps, and other procedures that result in a construct that can potentially be expressed in a host cell.

[0196] The terms “gene” and “gene fragment” are used interchangeably herein. They refer to a polynucleotide containing at least one open reading frame that is capable of encoding a particular protein after being transcribed and translated. A gene or gene fragment may be genomic or cDNA, as long as the polynucleotide contains at least one open reading frame, which may cover the entire coding region or a segment thereof. A “fusion gene” is a gene composed of at least two heterologous polynucleotides that are linked together.

[0197] “Homology” or “homologous” or “sequence identity” refers to sequence similarity or interchangeability between two or more polynucleotide sequences or between two or more polypeptide sequences. When using a program such as BestFit to determine sequence identity, similarity or homology between two different amino acid sequences, the default settings may be used, or an appropriate scoring matrix, such as blosum45 or blosum80, may be selected to optimize identity, similarity or homology scores. Preferably, polynucleotides that are homologous are those which hybridize under stringent conditions as defined herein and have at least 70%, preferably at least 80%, more preferably at least 90%, more preferably 95%, more preferably 97%, more preferably 98%, and even more preferably 99% sequence identity compared to those sequences. Polypeptides that are homologous preferably have sequence identities of at least 80%, or at least 90%, or at least 95%, or at least 97%, or at least 98%, or have at least 99% sequence identity when sequences of comparable length are optimally aligned.

[0198] “Ligation” refers to the process of forming phosphodiester bonds between two nucleic acid fragments or genes, linking them together. To ligate the DNA fragments or genes together, the ends of the DNA must be compatible with each other. In some cases, the ends will be directly compatible after endonuclease digestion. However, it may be necessary to first convert the staggered ends commonly produced after endonuclease digestion to blunt ends to make them compatible for ligation.

[0199] The terms “stringent conditions” or “stringent hybridization conditions” includes reference to conditions under which a polynucleotide will hybridize to its target sequence, to a detectably greater degree than other sequences (e.g., at least 2-fold over background). Generally, stringency of hybridization is expressed, in part, with reference to the temperature and salt concentration under which the wash step is carried out. Typically, stringent conditions will be those in which the salt concentration is less than about 1.5 M Na ion, typically about 0.01 to 1.0 M Na ion concentration (or other salts) at pH 7.0 to 8.3 and the temperature is at least about 30° C. for short polynucleotides (e.g., 10 to 50 nucleotides) and at least about 60° C. for long polynucleotides (e.g., greater than 50 nucleotides)—for example, “stringent conditions” can include hybridization in 50% formamide, 1 M NaCl, 1% SDS at 37° C., and three washes for 15 min each in 0.1×SSC/1% SDS at 60° C. to 65° C. Alternatively, temperatures of about 65° C., 60° C., 55° C., or 42° C. may be used. SSC concentration may be varied from about 0.1 to 2×SSC, with SDS being present at about 0.1%. Such wash temperatures are typically selected to be about 5° C. to 20° C. lower than the thermal melting point for the specific sequence at a defined ionic strength and pH. The Tm is the temperature (under defined ionic strength and pH) at which 50% of the target sequence hybridizes to a perfectly matched probe. An equation for calculating Tm and conditions for nucleic acid hybridization are well known and can be found in Sambrook, J. et al., “Molecular Cloning: A Laboratory Manual,” 3^{rd} edition, Cold Spring Harbor Laboratory Press, 2001. Typically, blocking reagents are used to block non-specific hybridization. Such blocking reagents include, for instance, sheared and denatured salmon sperm DNA at about 100-200 μg/ml. Organic solvent, such as formamide at a concentration of about 35-50% v/v, may also be used under particular circumstances, such as for RNA:DNA hybridizations. Useful variations on these wash conditions will be readily apparent to those of ordinary skill in the art.

[0200] The terms “percent identity” and “% identity,” as applied to polynucleotide sequences, refer to the percentage of residue matches between at least two polynucleotide sequences aligned using a standardized algorithm. Such an algorithm may insert, in a standardized and reproducible way, gaps in the sequences being compared in order to optimize alignment between two sequences, and therefore achieve a more meaningful comparison of the two sequences. Percent identity may be measured over the length of an entire defined polynucleotide sequence, or may be measured over a shorter length, for example, over the length of a fragment taken from a larger, defined polynucleotide sequence, for instance, a fragment of at least 45, at least 60, at least 90, at least 120, at least 150, at least 210 or at least 450 contiguous residues. Such lengths are exemplary only, and it is understood that any fragment length supported by the sequences shown herein, in the tables, figures or Sequence Listing, may be used to describe a length over which percentage identity may be measured.

[0201] “Percent (%) sequence identity,” with respect to the polypeptide sequences identified herein, is defined as the percentage of amino acid residues in a query sequence that are identical with the amino acid residues of a second, reference polypeptide sequence or a portion thereof, after aligning the sequences and introducing gaps, if necessary, to achieve the maximum percent sequence identity, and not considering any conservative substitutions as part of the sequence identity. Alignment for purposes of determining percent amino acid sequence identity can be achieved in various ways that are within the skill in the art, for instance, using publicly available computer software such as BLAST, BLAST-2, ALIGN or Megalign (DNASTAR) software. Those skilled in the art can determine appropriate parameters for measuring alignment, including any algorithms needed to achieve maximal alignment over the full length of the sequences being compared. Percent identity may be measured over the length of an entire defined polypeptide sequence, or may be measured over a shorter length, for example, over the length of a fragment taken from a larger, defined polypeptide sequence, for instance, a fragment of at least 15, at least 20, at least 30, at least 40, at least 50, at least 70 or at least 150 contiguous residues. Such lengths are exemplary only, and it is understood that any fragment length supported by the sequences shown herein, in the tables, figures or Sequence Listing, may be used to describe a length over which percentage identity may be measured.

[0202] The term “non-repetitiveness” as used herein in the context of a polypeptide refers to a lack or limited degree of internal homology in a peptide or polypeptide sequence. The term “substantially non-repetitive” can mean, for example, that there are few or no instances of four contiguous amino acids in the sequence that are identical amino acid types or that the polypeptide has a average subsequence score (defined infra) of 3 or less or that there isn't a pattern in the order, from N- to C-terminus, of the sequence motifs that constitute the polypeptide sequence. The term “repetitiveness” as used herein in the context of a polypeptide refers to the degree of internal homology in a peptide or polypeptide sequence. In contrast, a “repetitive” sequence may contain multiple identical copies of short amino acid sequences. For instance, a polypeptide sequence of interest may be divided into n-mer sequences and the number of identical sequences can be counted. Highly repetitive sequences contain a large fraction of identical sequences while non-repetitive sequences contain few identical sequences. In the context of a polypeptide, a sequence can contain multiple copies of shorter sequences of defined or variable length, or motifs, in which the motifs themselves have non-repetitive sequences, rendering the full-length polypeptide substantially non-repetitive. The length of polypeptide within which the non-repetitiveness is measured can vary from 3 amino acids to about 200 amino acids, about from 6 to about 50 amino acids, or from about 9 to about 14 amino acids. “Repetitiveness” used in the context of polynucleotide sequences refers to the degree of internal homology in the sequence such as, for example, the frequency of identical nucleotide sequences of a given length. Repetitiveness can, for example, be measured by analyzing the frequency of identical sequences.

[0203] A “vector” is a nucleic acid molecule, preferably self-replicating in an appropriate host, which transfers an inserted nucleic acid molecule into and/or between host cells. The term includes vectors that function primarily for insertion of DNA or RNA into a cell, replication of vectors that function primarily for the replication of DNA or RNA, and expression vectors that function for transcription and/or translation of the DNA or RNA. Also included are vectors that provide more than one of the above functions. An “expression vector” is a polynucleotide which, when introduced into an appropriate host cell, can be transcribed and translated into a polypeptide(s). An “expression system” usually connotes a suitable host cell comprised of an expression vector that can function to yield a desired expression product.

[0204] “Serum degradation resistance,” as applied to a polypeptide, refers to the ability of the polypeptides to withstand degradation in blood or components thereof, which typically involves proteases in the serum or plasma. The serum degradation resistance can be measured by combining the protein with human (or mouse, rat, monkey, as appropriate) serum or plasma, typically for a range of days (e.g. 0.25, 0.5, 1, 2, 4, 8, 16 days), typically at about 37° C. The samples for these time points can be run on a Western blot assay and the protein is detected with an antibody. The antibody can be to a tag in the protein. If the protein shows a single band on the western, where the protein's size is identical to that of the injected protein, then no degradation has occurred. In this exemplary method, the time point where 50% of the protein is degraded, as judged by Western blots or equivalent techniques, is the serum degradation half-life or “serum half-life” of the protein.

[0205] The term “t_{1/2}” as used herein means the terminal half-life calculated as ln(2)/Kₑₗ. Kₑₗ is the terminal elimination rate constant calculated by linear regression of the terminal linear portion of the log concentration vs. time curve. Half-life typically refers to the time required for half the quantity of an administered substance deposited in a living organism to be metabolized or eliminated by normal biological processes. The terms “t_{1/2}”, “terminal half-life”, “elimination half-life” and “circulating half-life” are used interchangeably herein.

[0206] “Active clearance” means the mechanisms by which CF is removed from the circulation other than by filtration or coagulation, and which includes removal from the circulation mediated by cells, receptors, metabolism, or degradation of the FVIII.

[0207] “Apparent molecular weight factor” and “apparent molecular weight” are related terms referring to a measure of the relative increase or decrease in apparent molecular weight exhibited by a particular amino acid sequence. The apparent molecular weight is determined using size exclusion chromatography (SEC) or similar methods by comparing to globular protein standards, and is measured in “apparent kD” units. The apparent molecular weight factor is the ratio between the apparent molecular weight and the actual molecular weight; the latter predicted by adding, based on amino acid composition, the calculated molecular weight of each type of amino acid in the composition or by estimation from comparison to molecular weight standards in an SDS electrophoresis gel.

[0208] The terms “hydrodynamic radius” or “Stokes radius” is the effective radius (Rₕ in nm) of a molecule in a solution measured by assuming that it is a body moving through the solution and resisted by the solution's viscosity. In the embodiments of the invention, the hydrodynamic radius measurements of the XTEN fusion proteins correlate with the ‘apparent molecular weight factor’, which is a more intuitive measure. The “hydrodynamic radius” of a protein affects its rate of diffusion in aqueous solution as well as its ability to migrate in gels of macromolecules. The hydrodynamic radius of a protein is determined by its molecular weight as well as by its structure, including shape and compactness. Methods for determining the hydrodynamic radius are well known in the art, such as by the use of size exclusion chromatography (SEC), as described in U.S. Pat. Nos. 6,406,632 and 7,294,513. Most proteins have globular structure, which is the most compact three-dimensional structure a protein can have with the smallest hydrodynamic radius. Some proteins adopt a random and open, unstructured, or ‘linear’ conformation and as a result have a much larger hydrodynamic radius compared to typical globular proteins of similar molecular weight.

[0209] “Physiological conditions” refers to a set of conditions in a living host as well as in vitro conditions, including temperature, salt concentration, pH, that mimic those conditions of a living subject. A host of physiologically relevant conditions for use in in vitro assays have been established. Generally, a physiological buffer contains a physiological concentration of salt and is adjusted to a neutral pH ranging from about 6.5 to about 7.8, and preferably from about 7.0 to about 7.5. A variety of physiological buffers are listed in Sambrook et al. (2001). Physiologically relevant temperature ranges from about 25° C. to about 38° C., and preferably from about 35° C. to about 37° C.

[0210] A “reactive group” is a chemical structure that can be coupled to a second reactive group. Examples for reactive groups are amino groups, carboxyl groups, sulfhydryl groups, hydroxyl groups, aldehyde groups, azide groups. Some reactive groups can be activated to facilitate coupling with a second reactive group. Non-limiting examples for activation are the reaction of a carboxyl group with carbodiimide, the conversion of a carboxyl group into an activated ester, or the conversion of a carboxyl group into an azide function.

[0211] “Controlled release agent”, “slow release agent”, “depot formulation” and “sustained release agent” are used interchangeably to refer to an agent capable of extending the duration of release of a polypeptide of the invention relative to the duration of release when the polypeptide is administered in the absence of agent. Different embodiments of the present invention may have different release rates, resulting in different therapeutic amounts.

[0212] The terms “antigen”, “target antigen” and “immunogen” are used interchangeably herein to refer to the structure or binding determinant that an antibody fragment or an antibody fragment-based therapeutic binds to or has specificity against.

[0213] The term “payload” as used herein refers to a protein or peptide sequence that has biological or therapeutic activity; the counterpart to the pharmacophore of small molecules. Examples of payloads include, but are not limited to, coagulation factors, cytokines, enzymes, hormones, and blood and growth factors. Payloads can further comprise genetically fused or chemically conjugated moieties such as chemotherapeutic agents, antiviral compounds, toxins, or contrast agents. These conjugated moieties can be joined to the rest of the polypeptide via a linker that may be cleavable or non-cleavable.

[0214] The term “antagonist”, as used herein, includes any molecule that partially or fully blocks, inhibits, or neutralizes a biological activity of a native polypeptide disclosed herein. Methods for identifying antagonists of a polypeptide may comprise contacting a native polypeptide with a candidate antagonist molecule and measuring a detectable change in one or more biological activities normally associated with the native polypeptide. In the context of the present invention, antagonists may include proteins, nucleic acids, carbohydrates, antibodies or any other molecules that decrease the effect of a biologically active protein.

[0215] The term “agonist” is used in the broadest sense and includes any molecule that mimics a biological activity of a native polypeptide disclosed herein. Suitable agonist molecules specifically include agonist antibodies or antibody fragments, fragments or amino acid sequence variants of native polypeptides, peptides, small organic molecules, etc. Methods for identifying agonists of a native polypeptide may comprise contacting a native polypeptide with a candidate agonist molecule and measuring a detectable change in one or more biological activities normally associated with the native polypeptide.

[0216] As used herein, “treat” or “treating,” or “palliating” or “ameliorating” are used interchangeably and mean administering a drug or a biologic to achieve a therapeutic benefit, to cure or reduce the severity of an existing disease, disorder or condition, or to achieve a prophylactic benefit, prevent or reduce the likelihood of onset or severity the occurrence of a disease, disorder or condition. By therapeutic benefit is meant eradication or amelioration of the underlying disorder being treated or one or more of the physiological symptoms associated with the underlying disorder such that an improvement is observed in the subject, notwithstanding that the subject may still be afflicted with the underlying disorder.

[0217] A “therapeutic effect” or “therapeutic benefit,” as used herein, refers to a physiologic effect, including but not limited to the cure, mitigation, amelioration, or prevention of disease in humans or other animals, or to otherwise enhance physical or mental wellbeing of humans or animals, caused by a fusion polypeptide of the invention other than the ability to induce the production of an antibody against an antigenic epitope possessed by the biologically active protein. For prophylactic benefit, the compositions may be administered to a subject at risk of developing a particular disease or condition, or to a subject reporting one or more of the physiological symptoms of a disease, even though a diagnosis of this disease may not have been made.

[0218] The terms “therapeutically effective amount” and “therapeutically effective dose”, as used herein, refer to an amount of a drug or a biologically active protein, either alone or as a part of a fusion protein composition, that is capable of having any detectable, beneficial effect on any symptom, aspect, measured parameter or characteristics of a disease state or condition when administered in one or repeated doses to a subject. Such effect need not be absolute to be beneficial. Determination of a therapeutically effective amount is well within the capability of those skilled in the art, especially in light of the detailed disclosure provided herein.

[0219] The term “therapeutically effective dose regimen”, as used herein, refers to a schedule for consecutively administered multiple doses (i.e., at least two or more) of a biologically active protein, either alone or as a part of a fusion protein composition, wherein the doses are given in therapeutically effective amounts to result in sustained beneficial effect on any symptom, aspect, measured parameter or characteristics of a disease state or condition.

### I). General Techniques

[0220] The practice of the present invention employs, unless otherwise indicated, conventional techniques of immunology, biochemistry, chemistry, molecular biology, microbiology, cell biology, genomics and recombinant DNA, which are within the skill of the art. See Sambrook, J. et al., “Molecular Cloning: A Laboratory Manual,” 3^{rd} edition, Cold Spring Harbor Laboratory Press, 2001; “Current protocols in molecular biology”, F. M. Ausubel, et al. eds., 1987; the series “Methods in Enzymology,” Academic Press, San Diego, Calif.; “PCR 2: a practical approach”, M. J. MacPherson, B. D. Hames and G. R. Taylor eds., Oxford University Press, 1995; “Antibodies, a laboratory manual” Harlow, E. and Lane, D. eds., Cold Spring Harbor Laboratory, 1988; “Goodman & Gilman's The Pharmacological Basis of Therapeutics,” 11^{th} Edition, McGraw-Hill, 2005; and Freshney, R. I., “Culture of Animal Cells: A Manual of Basic Technique,” 4^{th} edition, John Wiley & Sons, Somerset, N.J., 2000, the contents of which are incorporated in their entirety herein by reference.

### II). Coagulation Factor VIII

[0221] The present invention relates, in part, to compositions comprising factor VIII coagulation factor (CF) linked to one or more extended recombinant proteins (XTEN), resulting in a CFXTEN fusion protein composition. As used herein, “CF” refers to factor VIII (FVIII) or mimetics, sequence variants and truncated versions of FVIII, as described below.

[0222] “Factor VIII” or “FVIII” or “FVIII polypeptide” means a blood coagulation factor protein and species and sequence variants thereof that includes, but is not limited to, the 2351 amino acid single-chain precursor protein (with a 19-amino acid hydrophobic signal peptide), the mature 2332 amino acid factor VIII cofactor protein of approximately 270-330 kDa with the domain structure A1-A2-B-A3-C1-C2, as well as the nonenzymatic “active” or cofactor form of FVIII (FVIIIa) that is a circulating heterodimer of two chains that form as a result of proteolytic cleavage after R1648 of a heavy chain form composed of A1-A2-B (in the range of 90-220 kD) of amino acids 1-1648 (numbered relative to the mature FVIII form) and a light chain A3-C1-C2 of 80 kDa of amino acids 1649-2232, each of which is depicted schematically in FIG. 1. Further, the A3 domain encompasses, at its N-terminus, an a3 acidic region. As used herein, “Factor VIII” or “FVIII” or “FVIII polypeptide” also includes variant forms, including proteins with substitutions, additions and/or deletions so long as the variant retains a desired biological activity such as procoagulant activity. In one embodiment, the human Factor VIII domains are defined by the following amino acid residues: A1, residues Ala1-Arg372; A2, residues Ser373-Arg740; B, residues Ser741-Arg1648; A3, residues Ser1649-Asn2019; C1, residues Lys2020-Asn2172; C2, residues Ser2173-Tyr2332. The A3-C1-C2 sequence includes residues Ser1649-Tyr2332. In another embodiment, residues Glu1649-Arg1689, is usually referred to as the a3 acidic region. In certain embodiments, the a3 acidic region is a part of the A3 domain. Such Factor VIII include truncated sequences such as B-domain deleted “BDD” sequences in which a portion or the majority of the B domain sequence is deleted (such as BDD sequences disclosed or referenced in U.S. Pat. Nos. 6,818,439 and 7,632,921), sequences that include heterologous amino acid insertions or substitutions (such as aspartic acid substituted for valine at position 75), or single chain FVIII (scFVIII) in which the heavy and light chains are covalently connected by a linker. As used herein, “FVIII” shall be any functional form of factor VIII molecule with the typical characteristics of blood coagulation factor VIII capable of e.g., correcting human factor VIII deficiencies when administered to such a subject, e.g., a subject with hemophilia A. FVIII or sequence variants have been isolated, characterized, and cloned, as described in U.S. Pat. or application Nos. 4,757,006; 4,965,199; 5,004,804; 5,198,349, 5,250,421; 5,919,766; 6,228,620; 6,818,439; 7,138,505; 7,632,921; and 20100081615.

[0223] Human factor VIII is encoded by a single-copy gene residing at the tip of the long arm of the X chromosome (q28). It comprises nearly 186,000 base pairs (bp) and constitutes approximately 0.1% of the X-chromosome (White, G. C. and Shoemaker, C. B., Blood (1989) 73:1-12). The DNA encoding the mature factor VIII mRNA is found in 26 separate exons ranging in size from 69 to 3,106 bp. The 25 intervening intron regions that separate the exons range in size from 207 to 32,400 bp. The complete gene consists of approximately 9 kb of exon and 177 kb of intron. The three repeat A domains have approximately 30% sequence homology. The B domain contains 19 of the approximately 25 predicted glycosylation sites, and the following A3 domain is believed to contain the binding site for the von Willebrand factor. The tandem C domains follow the A3 domain, and have approximately 37% homology to each other (White, G. C. and Shoemaker, C. B., Blood (1989) 73:1-12).

[0224] The B domain separates the A2 and A3 domains of native factor FVIII in the newly synthesized precursor single-chain molecule. The precise boundaries of the B domain have been variously reported as extending from amino acids 712 to 1648 of the precursor sequence (Wood et al., Nature (1984) 312:330-337) or amino acids 741-1648 (Pipe, S W, Haemophilia (2009) 15:1187-1196 and U.S. Pat. No. 7,560,107) or amino acids 740-1689 (Toole, J J, Proc. Natl. Acad. Sci. USA (1986) 83:5939-5942). As used herein, “B domain” used herein means amino acids 741-1648 of mature Factor VIII. As used herein, “FVIII B domain deletion” or “FVIII BDD” means a FVIII sequence with any, a fragment of, or all of amino acids 741 to 1648 deleted. In one embodiment, FVIII BDD variants retain remnant amino acids of the B domain from the N-terminal end (“B1” as used herein) and C-terminal end (“B2” as used herein). In one FVIII BDD variant, the B domain remnant amino acids are SFSQNPPVLKRHQR. In one FVIII BDD variant, the B1 remant is SFS and the B2 remant is QNPPVLKRHQR. In another FVIII BDD variant, the B1 remant is SFSQN and the B2 remant is PPVLKRHQR. A “B-domain-deleted Factor VIII,” “FVIII BDD,” or “BDD FVIII” may have the full or partial deletions disclosed in U.S. Pat. Nos. 6,316,226, 6,346,513, 7,041,635, 5,789,203, 6,060,447, 5,595,886, 6,228,620, 5,972,885, 6,048,720, 5,543,502, 5,610,278, 5,171,844, 5,112,950, 4,868,112, and 6,458,563, each of which is incorporated herein by reference in its entirety. In some embodiments, a B-domain-deleted Factor VIII sequence of the present invention comprises any one of the deletions disclosed at col. 4, line 4 to col. 5, line 28 and examples 1-5 of U.S. Pat. No. 6,316,226 (also in U.S. Pat. No. 6,346,513). In another embodiment, a B-domain deleted Factor VIII is the 5743/Q1638 B-domain deleted Factor VIII (SQ version Factor VIII) (e.g., Factor VIII having a deletion from amino acid 744 to amino acid 1637, e.g., Factor VIII having amino acids 1-743 and amino acids 1638-2332 of full-length Factor VIII). In some embodiments, a B-domain-deleted Factor VIII of the present invention has a deletion disclosed at col. 2, lines 26-51 and examples 5-8 of U.S. Pat. No. 5,789,203 (also U.S. Pat. No. 6,060,447, U.S. Pat. No. 5,595,886, and U.S. Pat. No. 6,228,620). In some embodiments, a B-domain-deleted Factor VIII has a deletion described in col. 1, lines 25 to col. 2, line 40 of U.S. Pat. No. 5,972,885; col. 6, lines 1-22 and example 1 of U.S. Pat. No. 6,048,720; col. 2, lines 17-46 of U.S. Pat. No. 5,543,502; col. 4, line 22 to col. 5, line 36 of U.S. Pat. No. 5,171,844; col. 2, lines 55-68, FIG. 2, and example 1 of U.S. Pat. No. 5,112,950; col. 2, line 2 to col. 19, line 21 and table 2 of U.S. Pat. No. 4,868,112; col. 2, line 1 to col. 3, line 19, col. 3, line 40 to col. 4, line 67, col. 7, line 43 to col. 8, line 26, and col. 11, line 5 to col. 13, line 39 of U.S. Pat. No. 7,041,635; or col. 4, lines 25-53, of U.S. Pat. No. 6,458,563. In some embodiments, a B-domain-deleted Factor VIII has a deletion of most of the B domain, but still contains amino-terminal sequences of the B domain that are essential for in vivo proteolytic processing of the primary translation product into two polypeptide chain, as disclosed in WO 91/09122, which is incorporated herein by reference in its entirety. In some embodiments, a B-domain-deleted Factor VIII is constructed with a deletion of amino acids 747-1638, i.e., virtually a complete deletion of the B domain. Hoeben R. C., et al. J. Biol. Chem. 265 (13): 7318-7323 (1990), incorporated herein by reference in its entirety. A B-domain-deleted Factor VIII may also contain a deletion of amino acids 771-1666 or amino acids 868-1562 of Factor VIII. Meulien P., et al. Protein Eng. 2(4): 301-6 (1988), incorporated herein by reference in its entirety. Additional B domain deletions that are part of the invention include: deletion of amino acids 982 through 1562 or 760 through 1639 (Toole et al., Proc. Natl. Acad. Sci. U.S.A. (1986) 83, 5939-5942)), 797 through 1562 (Eaton, et al. Biochemistry (1986) 25:8343-8347)), 741 through 1646 (Kaufman (PCT published application No. WO 87/04187)), 747-1560 (Sarver, et al., DNA (1987) 6:553-564)), 741 though 1648 (Pasek (PCT application No. 88/00831)), or 816 through 1598 or 741 through 1648 (Lagner (Behring Inst. Mitt. (1988) No 82:16-25, EP 295597)), each of which is incorporated herein by reference in its entirety. Each of the foregoing deletions may be made in any Factor VIII sequence.

[0225] Proteins involved in clotting include factor I, factor II, factor III, factor IV, factor V, factor VI, factor VII, factor VIII, factor IX, factor X, factor XI, factor XII, factor XIII, Protein C, and tissue factor (collectively or individually “clotting protein(s)”). The interaction of the major clotting proteins in the intrinsic and extrinsic clotting pathways is showed in FIG. 2. The majority of the clotting proteins are present in zymogen form, but when activated, exhibit a procoagulant protease activity in which they activate another of the clotting proteins, contributing to the intrinsic or extrinsic coagulation pathway and clot formation. In the intrinsic pathway of the coagulation cascade, FVIII associates with a complex of activated factor IX, factor X, calcium, and phospholipid. The factor VIII heterodimer has no enzymatic activity, but the heterodimer becomes active as a cofactor of the enzyme factor IXa after proteolytic activation by thrombin or factor Xa, with the activity of factor VIIIa characterized by its ability to form a membrane binding site for factors IXa and X in a conformation suitable for activation of the factor X by factor IXa.

[0226] The activated cofactor, factor VIIIa, is a heterotrimer comprised of the A1 domain and the A2 domain and the light chain including domains A3-C1-C2. The activation of factor IX is achieved by a two-step removal of the activation peptide (Ala 146-Arg 180) from the molecule (Bajaj et al., Human factor IX and factor IXa, in METHODS IN ENZYMOLOGY. 1993). The first cleavage is made at the Arg 145-Ala 146 site by either factor XIa or factor VIIa/tissue factor. The second, and rate limiting cleavage is made at Arg 180-Val 181. The activation removes 35 residues. Activated human factor IX exists as a heterodimer of the C-terminal heavy chain (28 kDa) and an N-terminal light chain (18 kDa), which are held together by one disulfide bridge attaching the enzyme to the Gla domain. Factor IXa in turn activates factor X in concert with activated factor VIII. Alternatively, factors IX and X can both be activated by factor VIIa complexed with lipidated tissue factor, generated via the extrinsic pathway. Factor Xa then participates in the final common pathway whereby prothrombin is converted to thrombin, and thrombin, in turn converts fibrinogen to fibrin to form the clot.

[0227] Defects in the coagulation process can lead to bleeding disorders in which the time taken for clot formation is prolonged. Such defects can be congenital or acquired. For example, hemophilia A and B are inherited diseases characterized by deficiencies in FVIII and FIX, respectively. Stated differently, biologically active factor VIII corrects the coagulation defect in plasma derived from individuals afflicted with hemophilia A. Recombinant FVIII has been shown to be effective and has been approved for the treatment of hemophilia A in adult and pediatric patients, and also is used to stop bleeding episodes or prevent bleeding associated with trauma and/or surgery. Current therapeutic uses of factor VIII can be problematic in the treatment of individuals exhibiting a deficiency in factor VIII, as well as those individuals with Von Willebrand's disease. In addition, individuals receiving factor VIII in replacement therapy frequently develop antibodies to these proteins. Continuing treatment is exceedingly difficult because of the presence of these antibodies that reduce or negate the efficacy of the treatment.

[0228] In one aspect, the invention contemplates inclusion of FVIII sequences in the CFXTEN fusion protein compositions that are identical to human FVIII, sequences that have homology to FVIII sequences, sequences that are natural, such as from humans, non-human primates, mammals (including domestic animals); all of which retain at least a portion of the procoagulant activity of native FVIII and that are useful for preventing, treating, mediating, or ameliorating hemophilia A or bleeding episodes related to trauma, surgery, or deficiency of coagulation factor VIII. “Procoagulant activity” as used herein refers to an activity that promotes clot formation, whether in an in vitro assay or in vivo. Sequences with homology to FVIII may be found by standard homology searching techniques, such as NCBI BLAST, or in public databases such as Chemical Abstracts Services Databases (e.g., the CAS Registry), GenBank, The Universal Protein Resource (UniProt) and subscription provided databases such as GenSeq (e.g., Derwent).

[0229] In one embodiment, the FVIII incorporated into the subject CFXTEN compositions is a recombinant polypeptide with a sequence corresponding to a FVIII protein found in nature. In another embodiment, the FVIII is a non-natural FVIII sequence variant, fragment, homolog, or a mimetic of a natural sequence that retains at least a portion of the procoagulant activity of the corresponding native FVIII. In another embodiment, the FVIII is a truncated variant with all or a portion of the B domain deleted (“FVIII BDD”), which can be in either heterodimeric form or can remain as a single chain (“scFVIII”), the latter described in Meulien et al., Protein Eng. (1988) 2(4):301-306. In another embodiment, heterologous sequences are incorporated into the FVIII, which may include XTEN, as described more fully below. Table 1 and Table 31 provide a non-limiting list of amino acid sequences of FVIII that are encompassed by the CFXTEN fusion proteins of the invention. In some embodiments, FVIII incorporated into CFXTEN fusion proteins include proteins that have at least about 80% sequence identity, or alternatively 81%, 82%, 83%, 84%, 85%, 86%, 87%, 88%, 89%, 90%, 91%, 92%, 93%, 94%, 95%, 96%, 97%, 98%, 99%, or 100% sequence identity compared to an amino acid sequence of comparable length selected from Table 1.

TABLE 1
FVIII amino acid sequences

| Name | |
|---|---|
| (source) | Amino Acid Sequence |
| FVIII | MQIELSTCFFLCLLRFCFSATRRYYLGAVELSWDYMQSDLGELPVDARFPPRVPKSFPFN |
| precursor | TSVVYKKTLFVEFTDHLFNIAKPRPPWMGLLGPTIQAEVYDTVVITLKNMASHPVSLHA |
| polypeptide | VGVSYWKASEGAEYDDQTSQREKEDDKVFPGGSHTYVWQVLKENGPMASDPLCLTYS |
| (human) | YLSHVDLVKDLNSGLIGALLVCREGSLAKEKTQTLHKFILLFAVFDEGKSWHSETKNSL |
| | MQDRDAASARAWPKMHTVNGYVNRSLPGLIGCHRKSVYWHVIGMGTTPEVHSIFLEG |
| | HTFLVRNHRQASLEISPITFLTAQTLLMDLGQFLLFCHISSHQHDGMEAYVKVDSCPEEP |
| | QLRMKNNEEAEDYDDDLTDSEMDVVRFDDDNSPSFIQIRSVAKKHPKTWVHYIAAEEE |
| | DWDYAPLVLAPDDRSYKSQYLNNGPQRIGRKYKKVRFMAYTDETFKTREAIQHESGIL |
| | GPLLYGEVGDTLLIIFKNQASRPYNIYPHGITDVRPLYSRRLPKGVKHLKDFPILPGEIFKY |
| | KWTVTVEDGPTKSDPRCLTRYYSSFVNMERDLASGLIGPLLICYKESVDQRGNQIMSDK |
| | RNVILFSVFDENRSWYLTENIQRFLPNPAGVQLEDPEFQASNIMHSINGYVFDSLQLSVC |
| | LHEVAYWYILSIGAQTDFLSVFFSGYTFKHKMVYEDTLTLFPFSGETVFMSMENPGLWI |
| | LGCHNSDFRNRGMTALLKVSSCDKNTGDYYEDSYEDISAYLLSKNNAIEPRSFSQNSRH |
| | PSTRQKQFNATTIPENDIEKTDPWFAHRTPMPKIQNVSSSDLLMLLRQSPTPHGLSLSDLQ |
| | EAKYETFSDDPSPGAIDSNNSLSEMTHFRPQLHHSGDMVFTPESGLQLRLNEKLGTTAAT |
| | ELKKLDFKVSSTSNNLISTIPSDNLAAGTDNTSSLGPPSMPVHYDSQLDTTLFGKKSSPLT |
| | ESGGPLSLSEENNDSKLLESGLMNSQESSWGKNVSSTESGRLFKGKRAHGPALLTKDNA |
| | LFKVSISLLKTNKTSNNSATNRKTHIDGPSLLIENSPSVWQNILESDTEFKKVTPLIHDRM |
| | LMDKNATALRLNHMSNKTTSSKNMEMVQQKKEGPIPPDAQNPDMSFFKMLFLPESAR |
| | WIQRTHGKNSLNSGQGPSPKQLVSLGPEKSVEGQNFLSEKNKVVVGKGEFTKDVGLKE |
| | MVFPSSRNLFLTNLDNLHENNTHNQEKKIQEEIEKKETLIQENVVLPQIHTVTGTKNFMK |
| | NLFLLSTRQNVEGSYDGAYAPVLQDFRSLNDSTNRTKKHTAHFSKKGEEENLEGLGNQ |
| | TKQIVEKYACTTRISPNTSQQNFVTQRSKRALKQFRLPLEETELEKRIIVDDTSTQWSKN |
| | MKHLTPSTLTQIDYNEKEKGAITQSPLSDCLTRSHSIPQANRSPLPIAKVSSFPSIRPIYLTR |
| | VLFQDNSSHLPAASYRKKDSGVQESSHFLQGAKKNNLSLAILTLEMTGDQREVGSLGTS |
| | ATNSVTYKKVENTVLPKPDLPKTSGKVELLPKVHIYQKDLFPTETSNGSPGHLDLVEGSL |
| | LQGTEGAIKWNEANRPGKVPFLRVATESSAKTPSKLLDPLAWDNHYGTQIPKEEWKSQ |
| | EKSPEKTAFKKKDTILSLNACESNHAIAAINEGQNKPEIEVTWAKQGRTERLCSQNPPVL |
| | KRHQREITRTTLQSDQEEIDYDDTISVEMKKEDFDIYDEDENQSPRSFQKKTRHYFIAAV |
| | ERLWDYGMSSSPHVLRNRAQSGSVPQFKKVVFQEFTDGSFTQPLYRGELNEHLGLLGP |
| | YIRAEVEDNIMVTFRNQASRPYSFYSSLISYEEDQRQGAEPRKNFVKPNETKTYFWKVQ |
| | HHMAPTKDEFDCKAWAYFSDVDLEKDVHSGLIGPLLVCHTNTLNPAHGRQVTVQEFAL |
| | FFTIFDETKSWYFTENMERNCRAPCNIQMEDPTFKENYRFHAINGYIMDTLPGLVMAQD |
| | QRIRWYLLSMGSNENIHSIHFSGHVFTVRKKEEYKMALYNLYPGVFETVEMLPSKAGIW |
| | RVECLIGEHLHAGMSTLFLVYSNKCQTPLGMASGHIRDFQITASGQYGQWAPKLARLH |
| | YSGSINAWSTKEPFSWIKVDLLAPMIIHGIKTQGARQKFSSLYISQFIIMYSLDGKKWQTY |
| | RGNSTGTLMVFFGNVDSSGIKHNIFNPPIIARYIRLHPTHYSIRSTLRMELMGCDLNSCSM |
| | PLGMESKAISDAQITASSYFTNMFATWSPSKARLHLQGRSNAWRPQVNNPKEWLQVDF |
| | QKTMKVTGVTTQGVKSLLTSMYVKEFLISSSQDGHQWTLFFQNGKVKVFQGNQDSFTP |
| | VVNSLDPPLLTRYLRIHPQSWVHQIALRMEVLGCEAQDLY |
| FVIII mature | ATRRYYLGAVELSWDYMQSDLGELPVDARFPPRVPKSFPFNTSVVYKKTLFVEFTDHLF |
| (human) | NIAKPRPPWMGLLGPTIQAEVYDTVVITLKNMASHPVSLHAVGVSYWKASEGAEYDDQ |
| | TSQREKEDDKVFPGGSHTYVWQVLKENGPMASDPLCLTYSYLSHVDLVKDLNSGLIGA |
| | LLVCREGSLAKEKTQTLHKFILLFAVFDEGKSWHSETKNSLMQDRDAASARAWPKMHT |
| | VNGYVNRSLPGLIGCHRKSVYWHVIGMGTTPEVHSIFLEGHTFLVRNHRQASLEISPITFL |
| | TAQTLLMDLGQFLLFCHISSHQHDGMEAYVKVDSCPEEPQLRMKNNEEAEDYDDDLTD |
| | SEMDVVRFDDDNSPSFIQIRSVAKKHPKTWVHYIAAEEEDWDYAPLVLAPDDRSYKSQ |
| | YLNNGPQRIGRKYKKVRFMAYTDETFKTREAIQHESGILGPLLYGEVGDTLLIIFKNQAS |
| | RPYNIYPHGITDVRPLYSRRLPKGVKHLKDFPILPGEIFKYKWTVTVEDGPTKSDPRCLT |
| | RYYSSFVNMERDLASGLIGPLLICYKESVDQRGNQIMSDKRNVILFSVFDENRSWYLTEN |
| | IQRFLPNPAGVQLEDPEFQASNIMHSINGYVFDSLQLSVCLHEVAYWYILSIGAQTDFLS |
| | VFFSGYTFKHKMVYEDTLTLFPFSGETVFMSMENPGLWILGCHNSDFRNRGMTALLKV |
| | SSCDKNTGDYYEDSYEDISAYLLSKNNAIEPRSFSQNSRHPSTRQKQFNATTIPENDIEKT |
| | DPWFAHRTPMPKIQNVSSSDLLMLLRQSPTPHGLSLSDLQEAKYETFSDDPSPGAIDSNN |
| | SLSEMTHFRPQLHHSGDMVFTPESGLQLRLNEKLGTTAATELKKLDFKVSSTSNNLISTIP |
| | SDNLAAGTDNTSSLGPPSMPVHYDSQLDTTLFGKKSSPLTESGGPLSLSEENNDSKLLES |
| | GLMNSQESSWGKNVSSTESGRLFKGKRAHGPALLTKDNALFKVSISLLKTNKTSNNSAT |
| | NRKTHIDGPSLLIENSPSVWQNILESDTEFKKVTPLIHDRMLMDKNATALRLNHMSNKT |
| | TSSKNMEMVQQKKEGPIPPDAQNPDMSFFKMLFLPESARWIQRTHGKNSLNSGQGPSPK |
| | QLVSLGPEKSVEGQNFLSEKNKVVVGKGEFTKDVGLKEMVFPSSRNLFLTNLDNLHEN |
| | NTHNQEKKIQEEIEKKETLIQENVVLPQIHTVTGTKNFMKNLFLLSTRQNVEGSYDGAY |
| | APVLQDFRSLNDSTNRTKKHTAHFSKKGEEENLEGLGNQTKQIVEKYACTTRISPNTSQ |
| | QNFVTQRSKRALKQFRLPLEETELEKRIIVDDTSTQWSKNMKHLTPSTLTQIDYNEKEKG |
| | AITQSPLSDCLTRSHSIPQANRSPLPIAKVSSFPSIRPIYLTRVLFQDNSSHLPAASYRKKDS |
| | GVQESSHFLQGAKKNNLSLAILTLEMTGDQREVGSLGTSATNSVTYKKVENTVLPKPDL |
| | PKTSGKVELLPKVHIYQKDLFPTETSNGSPGHLDLVEGSLLQGTEGAIKWNEANRPGKV |
| | PFLRVATESSAKTPSKLLDPLAWDNHYGTQIPKEEWKSQEKSPEKTAFKKKDTILSLNAC |
| | ESNHAIAAINEGQNKPEIEVTWAKQGRTERLCSQNPPVLKRHQREITRTTLQSDQEEIDY |
| | DDTISVEMKKEDFDIYDEDENQSPRSFQKKTRHYFIAAVERLWDYGMSSSPHVLRNRAQ |
| | SGSVPQFKKVVFQEFTDGSFTQPLYRGELNEHLGLLGPYIRAEVEDNIMVTFRNQASRPY |
| | SFYSSLISYEEDQRQGAEPRKNFVKPNETKTYFWKVQHHMAPTKDEFDCKAWAYFSDV |
| | DLEKDVHSGLIGPLLVCHTNTLNPAHGRQVTVQEFALFFTIFDETKSWYFTENMERNCR |
| | APCNIQMEDPTFKENYRFHAINGYIMDTLPGLVMAQDQRIRWYLLSMGSNENIHSIHFS |
| | GHVFTVRKKEEYKMALYNLYPGVFETVEMLPSKAGIWRVECLIGEHLHAGMSTLFLVY |
| | SNKCQTPLGMASGHIRDFQITASGQYGQWAPKLARLHYSGSINAWSTKEPFSWIKVDLL |
| | APMIIHGIKTQGARQKFSSLYISQFIIMYSLDGKKWQTYRGNSTGTLMVFFGNVDSSGIK |
| | HNIFNPPIIARYIRLHPTHYSIRSTLRMELMGCDLNSCSMPLGMESKAISDAQITASSYFTN |
| | MFATWSPSKARLHLQGRSNAWRPQVNNPKEWLQVDFQKTMKVTGVTTQGVKSLLTS |
| | MYVKEFLISSSQDGHQWTLFFQNGKVKVFQGNQDSFTPVVNSLDPPLLTRYLRIHPQSW |
| | VHQIALRMEVLGCEAQDLY |
| FVIII (Canine) | MQVELYTCCFLCLLPFSLSATRKYYLGAVELSWDYMQSDLLSALHADTSFSSRVPGSLP |
| | LTTSVTYRKTVFVEFTDDLFNIAKPRPPWMGLLGPTIQAEVYDTVVIVLKNMASHPVSL |
| | HAVGVSYWKASEGAEYEDQTSQKEKEDDNVIPGESHTYVWQVLKENGPMASDPPCLT |
| | YSYFSHVDLVKDLNSGLIGALLVCKEGSLAKERTQTLQEFVLLFAVFDEGKSWHSETNA |
| | SLTQAEAQHELHTINGYVNRSLPGLTVCHKRSVYWHVIGMGTTPEVHSIFLEGHTFLVR |
| | NHRQASLEISPITFLTAQTFLMDLGQFLLFCHIPSHQHDGMEAYVKVDSCPEEPQLRMKN |
| | NEDKDYDDGLYDSDMDVVSFDDDSSSPFIQIRSVAKKHPKTWVHYIAAEEEDWDYAPS |
| | GPTPNDRSHKNLYLNNGPQRIGKKYKKVRFVAYTDETFKTREAIQYESGILGPLLYGEV |
| | GDTLLIIFKNQASRPYNIYPHGINYVTPLHTGRLPKGVKHLKDMPILPGEIFKYKWTVTV |
| | EDGPTKSDPRCLTRYYSSFINLERDLASGLIGPLLICYKESVDQRGNQMMSDKRNVILFS |
| | VFDENRSWYLTENMQRFLPNADVVQPHDPEFQLSNIMHSINGYVFDNLQLSVCLHEVA |
| | YWYILSVGAQTDFLSVFFSGYTFKHKMVYEDTLTLFPFSGETVFMSMENPGLWVLGCH |
| | NSDFRNRGMTALLKVSSCNRNIDDYYEDTYEDIPTPLLNENNVIKPRSFSQNSRHPSTKE |
| | KQLKATTTPENDIEKIDLQSGERTQLIKAQSVSSSDLLMLLGQNPTPRGLFLSDLREATDR |
| | ADDHSRGAIERNKGPPEVASLRPELRHSEDREFTPEPELQLRLNENLGTNTTVELKKLDL |
| | KISSSSDSLMTSPTIPSDKLAAATEKTGSLGPPNMSVHFNSHLGTIVFGNNSSHLIQSGVPL |
| | ELSEEDNDSKLLEAPLMNIQESSLRENVLSMESNRLFKEERIRGPASLIKDNALFKVNISS |
| | VKTNRAPVNLTTNRKTRVAIPTLLIENSTSVWQDIMLERNTEFKEVTSLIHNETFMDRNT |
| | TALGLNHVSNKTTLSKNVEMAHQKKEDPVPLRAENPDLSSSKIPFLPDWIKTHGKNSLS |
| | SEQRPSPKQLTSLGSEKSVKDQNFLSEEKVVVGEDEFTKDTELQEIFPNNKSIFFANLANV |
| | QENDTYNQEKKSPEEIERKEKLTQENVALPQAHTMIGTKNFLKNLFLLSTKQNVAGLEE |
| | QPYTPILQDTRSLNDSPHSEGIHMANFSKIREEANLEGLGNQTNQMVERFPSTTRMSSNA |
| | SQHVITQRGKRSLKQPRLSQGEIKFERKVIANDTSTQWSKNMNYLAQGTLTQIEYNEKE |
| | KRAITQSPLSDCSMRNHVTIQMNDSALPVAKESASPSVRHTDLTKIPSQHNSSHLPASAC |
| | NYTFRERTSGVQEGSHFLQEAKRNNLSLAFVTLGITEGQGKFSSLGKSATNQPMYKKLE |
| | NTVLLQPGLSETSDKVELLSQVHVDQEDSFPTKTSNDSPGHLDLMGKIFLQKTQGPVKM |
| | NKTNSPGKVPFLKWATESSEKIPSKLLGVLAWDNHYDTQIPSEEWKSQKKSQTNTAFKR |
| | KDTILPLGPCENNDSTAAINEGQDKPQREAMWAKQGEPGRLCSQNPPVSKHHQREITVT |
| | TLQPEEDKFEYDDTFSIEMKREDFDIYGDYENQGLRSFQKKTRHYFIAAVERLWDYGMS |
| | RSPHILRNRAQSGDVQQFKKVVFQEFTDGSFTQPLYRGELNEHLGLLGPYIRAEVEDNIV |
| | VTFKNQASRPYSFYSSLISYDEDEGQGAEPRRKFVNPNETKIYFWKVQHHMAPTKDEFD |
| | CKAWAYFSDVDLEKDVHSGLIGPLLICRSNTLNPAHGRQVTVQEFALVFTIFDETKSWY |
| | FTENLERNCRAPCNVQKEDPTLKENFRFHAINGYVKDTLPGLVMAQDQKVRWYLLSM |
| | GSNENIHSIHFSGHVFTVRKKEEYKMAVYNLYPGVFETVEMLPSQVGIWRIECLIGEHLQ |
| | AGMSTLFLVYSKKCQTPLGMASGHIRDFQITASGQYGQWAPKLARLHYSGSINAWSTK |
| | DPFSWIKVDLLAPMIIHGIMTQGARQKFSSLYVSQFIIMYSLDGNKWHSYRGNSTGTLM |
| | VFFGNVDSSGIKHNIFNPPIIAQYIRLHPTHYSIRSTLRMELLGCDFNSCSMPLGMESKAIS |
| | DAQITASSYLSSMLATWSPSQARLHLQGRTNAWRPQANNPKEWLQVDFRKTMKVTGIT |
| | TQGVKSLLISMYVKEFLISSSQDGHNWTLFLQNGKVKVFQGNRDSSTPVRNRLEPPLVA |
| | RYVRLHPQSWAHHIALRLEVLGCDTQQPA |
| FVIII (Pig) | ATRRYYLGAVELSWDYMQSDLGELPVDARFPPRVPKSFPFNTSVVYKKTLFVEFTDHLF |
| | NIAKPRPPWMGLLGPTIQAEVYDTVVITLKNMASHPVSLHAVGVSYWKASEGAEYDDQ |
| | TSQREKEDDKVFPGGSHTYVWQVLKENGPMASDPLCLTYSYLSHVDLVKDLNSGLIGA |
| | LLVCREGSLAKEKTQTLHKFILLFAVFDEGKSWHSETKNSLMQDRDAASARAWPKMHT |
| | VNGYVNRSLPGLIGCHRKSVYWHVIGMGTTPEVHSIFLEGHTFLVRNHRQASLEISPITFL |
| | TAQTLLMDLGQFLLFCHISSHQHDGMEAYVKVDSCPEEPQLRMKNNEEAEDYDDDLTD |
| | SEMDVVRFDDDNSPSFIQIRSVAKKHPKTWVHYIAAEEEDWDYAPLVLAPDDRSYKSQ |
| | YLNNGPQRIGRKYKKVRFMAYTDETFKTREAIQHESGILGPLLYGEVGDTLLIIFKNQAS |
| | RPYNIYPHGITDVRPLYSRRLPKGVKHLKDFPILPGEIFKYKWTVTVEDGPTKSDPRCLT |
| | RYYSSFVNMERDLASGLIGPLLICYKESVDQRGNQIMSDKRNVILFSVFDENRSWYLTEN |
| | IQRFLPNPAGVQLEDPEFQASNIMHSINGYVFDSLQLSVCLHEVAYWYILSIGAQTDFLS |
| | VFFSGYTFKHKMVYEDTLTLFPFSGETVFMSMENPGLWILGCHNSDFRNRGMTALLKV |
| | SSCDKNTGDYYEDSYEDISAYLLSKNNAIEPRSFSQNSRHPSTRQKQFNATTIPENDIEKT |
| | DPWFAHRTPMPKIQNVSSSDLLMLLRQSPTPHGLSLSDLQEAKYETFSDDPSPGAIDSNN |
| | SLSEMTHFRPQLHHSGDMVFTPESGLQLRLNEKLGTTAATELKKLDFKVSSTSNNLISTIP |
| | SDNLAAGTDNTSSLGPPSMPVHYDSQLDTTLFGKKSSPLTESGGPLSLSEENNDSKLLES |
| | GLMNSQESSWGKNVSSTESGRLFKGKRAHGPALLTKDNALFKVSISLLKTNKTSNNSAT |
| | NRKTHIDGPSLLIENSPSVWQNILESDTEFKKVTPLIHDRMLMDKNATALRLNHMSNKT |
| | TSSKNMEMVQQKKEGPIPPDAQNPDMSFFKMLFLPESARWIQRTHGKNSLNSGQGPSPK |
| | QLVSLGPEKSVEGQNFLSEKNKVVVGKGEFTKDVGLKEMVFPSSRNLFLTNLDNLHEN |
| | NTHNQEKKIQEEIEKKETLIQENVVLPQIHTVTGTKNFMKNLFLLSTRQNVEGSYDGAY |
| | APVLQDFRSLNDSTNRTKKHTAHFSKKGEEENLEGLGNQTKQIVEKYACTTRISPNTSQ |
| | QNFVTQRSKRALKQFRLPLEETELEKRIIVDDTSTQWSKNMKHLTPSTLTQIDYNEKEKG |
| | AITQSPLSDCLTRSHSIPQANRSPLPIAKVSSFPSIRPIYLTRVLFQDNSSHLPAASYRKKDS |
| | GVQESSHFLQGAKKNNLSLAILTLEMTGDQREVGSLGTSATNSVTYKKVENTVLPKPDL |
| | PKTSGKVELLPKVHIYQKDLFPTETSNGSPGHLDLVEGSLLQGTEGAIKWNEANRPGKV |
| | PFLRVATESSAKTPSKLLDPLAWDNHYGTQIPKEEWKSQEKSPEKTAFKKKDTILSLNAC |
| | ESNHAIAAINEGQNKPEIEVTWAKQGRTERLCSQNPPVLKRHQREITRTTLQSDQEEIDY |
| | DDTISVEMKKEDFDIYDEDENQSPRSFQKKTRHYFIAAVERLWDYGMSSSPHVLRNRAQ |
| | SGSVPQFKKVVFQEFTDGSFTQPLYRGELNEHLGLLGPYIRAEVEDNIMVTFRNQASRPY |
| | SFYSSLISYEEDQRQGAEPRKNFVKPNETKTYFWKVQHHMAPTKDEFDCKAWAYFSDV |
| | DLEKDVHSGLIGPLLVCHTNTLNPAHGRQVTVQEFALFFTIFDETKSWYFTENMERNCR |
| | APCNIQMEDPTFKENYRFHAINGYIMDTLPGLVMAQDQRIRWYLLSMGSNENIHSIHFS |
| | GHVFTVRKKEEYKMALYNLYPGVFETVEMLPSKAGIWRVECLIGEHLHAGMSTLFLVY |
| | SNKCQTPLGMASGHIRDFQITASGQYGQWAPKLARLHYSGSINAWSTKEPFSWIKVDLL |
| | APMIIHGIKTQGARQKFSSLYISQFIIMYSLDGKKWQTYRGNSTGTLMVFFGNVDSSGIK |
| | HNIFNPPIIARYIRLHPTHYSIRSTLRMELMGCDLNSCSMPLGMESKAISDAQITASSYFTN |
| | MFATWSPSKARLHLQGRSNAWRPQVNNPKEWLQVDFQKTMKVTGVTTQGVKSLLTS |
| | MYVKEFLISSSQDGHQWTLFFQNGKVKVFQGNQDSFTPVVNSLDPPLLTRYLRIHPQSW |
| | VHQIALRMEVLGCEAQDLY |
| FVIII (Mouse) | AIRRYYLGAVELSWNYIQSDLLSVLHTDSRFLPRMSTSFPFNTSIMYKKTVFVEYKDQLF |
| | NIAKPRPPWMGLLGPTIWTEVHDTVVITLKNMASHPVSLHAVGVSYWKASEGDEYEDQ |
| | TSQMEKEDDKVFPGESHTYVWQVLKENGPMASDPPCLTYSYMSHVDLVKDLNSGLIG |
| | ALLVCKEGSLSKERTQMLYQFVLLFAVFDEGKSWHSETNDSYTQSMDSASARDWPKM |
| | HTVNGYVNRSLPGLIGCHRKSVYWHVIGMGTTPEIHSIFLEGHTFFVRNHRQASLEISPIT |
| | FLTAQTLLIDLGQFLLFCHISSHKHDGMEAYVKVDSCPEESQWQKKNNNEEMEDYDDD |
| | LYSEMDMFTLDYDSSPFIQIRSVAKKYPKTWIHYISAEEEDWDYAPSVPTSDNGSYKSQ |
| | YLSNGPHRIGRKYKKVRFIAYTDETFKTRETIQHESGLLGPLLYGEVGDTLLIIFKNQASR |
| | PYNIYPHGITDVSPLHARRLPRGIKHVKDLPIHPGEIFKYKWTVTVEDGPTKSDPRCLTRY |
| | YSSFINPERDLASGLIGPLLICYKESVDQRGNQMMSDKRNVILFSIFDENQSWYITENMQ |
| | RFLPNAAKTQPQDPGFQASNIMHSINGYVFDSLELTVCLHEVAYWHILSVGAQTDFLSIF |
| | FSGYTFKHKMVYEDTLTLFPFSGETVFMSMENPGLWVLGCHNSDFRKRGMTALLKVSS |
| | CDKSTSDYYEEIYEDIPTQLVNENNVIDPRSFFQNTNHPNTRKKKFKDSTIPKNDMEKIEP |
| | QFEEIAEMLKVQSVSVSDMLMLLGQSHPTPHGLFLSDGQEAIYEAIHDDHSPNAIDSNEG |
| | PSKVTQLRPESHHSEKIVFTPQPGLQLRSNKSLETTIEVKWKKLGLQVSSLPSNLMTTTIL |
| | SDNLKATFEKTDSSGFPDMPVHSSSKLSTTAFGKKAYSLVGSHVPLNASEENSDSNILDS |
| | TLMYSQESLPRDNILSIENDRLLREKRFHGIALLTKDNTLFKDNVSLMKTNKTYNHSTTN |
| | EKLHTESPTSIENSTTDLQDAILKVNSEIQEVTALIHDGTLLGKNSTYLRLNHMLNRTTST |
| | KNKDIFHRKDEDPIPQDEENTIMPFSKMLFLSESSNWFKKTNGNNSLNSEQEHSPKQLVY |
| | LMFKKYVKNQSFLSEKNKVTVEQDGFTKNIGLKDMAFPHNMSIFLTTLSNVHENGRHN |
| | QEKNIQEEIEKEALIEEKVVLPQVHEATGSKNFLKDILILGTRQNISLYEVHVPVLQNITSI |
| | NNSTNTVQIHMEHFFKRRKDKETNSEGLVNKTREMVKNYPSQKNITTQRSKRALGQFR |
| | LSTQWLKTINCSTQCIIKQIDHSKEMKKFITKSSLSDSSVIKSTTQTNSSDSHIVKTSAFPPI |
| | DLKRSPFQNKFSHVQASSYIYDFKTKSSRIQESNNFLKETKINNPSLAILPWNMFIDQGKF |
| | TSPGKSNTNSVTYKKRENIIFLKPTLPEESGKIELLPQVSIQEEEILPTETSHGSPGHLNLM |
| | KEVFLQKIQGPTKWNKAKRHGESIKGKTESSKNTRSKLLNHHAWDYHYAAQIPKDMW |
| | KSKEKSPEIISIKQEDTILSLRPHGNSHSIGANEKQNWPQRETTWVKQGQTQRTCSQIPPV |
| | LKRHQRELSAFQSEQEATDYDDAITIETIEDFDIYSEDIKQGPRSFQQKTRHYFIAAVERL |
| | WDYGMSTSHVLRNRYQSDNVPQFKKVVFQEFTDGSFSQPLYRGELNEHLGLLGPYIRA |
| | EVEDNIMVTFKNQASRPYSFYSSLISYKEDQRGEEPRRNFVKPNETKIYFWKVQHHMAP |
| | TEDEFDCKAWAYFSDVDLERDMHSGLIGPLLICHANTLNPAHGRQVSVQEFALLFTIFD |
| | ETKSWYFTENVKRNCKTPCNFQMEDPTLKENYRFHAINGYVMDTLPGLVMAQDQRIR |
| | WYLLSMGNNENIQSIHFSGHVFTVRKKEEYKMAVYNLYPGVFETLEMIPSRAGIWRVEC |
| | LIGEHLQAGMSTLFLVYSKQCQIPLGMASGSIRDFQITASGHYGQWAPNLARLHYSGSIN |
| | AWSTKEPFSWIKVDLLAPMIVHGIKTQGARQKFSSLYISQFIIMYSLDGKKWLSYQGNST |
| | GTLMVFFGNVDSSGIKHNSFNPPIIARYIRLHPTHSSIRSTLRMELMGCDLNSCSIPLGMES |
| | KVISDTQITASSYFTNMFATWSPSQARLHLQGRTNAWRPQVNDPKQWLQVDLQKTMK |
| | VTGIITQGVKSLFTSMFVKEFLISSSQDGHHWTQILYNGKVKVFQGNQDSSTPMMNSLD |
| | PPLLTRYLRIHPQIWEHQIALRLEILGCEAQQQY |
| FVIII BDD | MQIELSTCFFLCLLRFCFSATRRYYLGAVELSWDYMQSDLGELPVDARFPPRVPKSFPFN |
| variant (U.S. | TSVVYKKTLFVEFTVHLFNIAKPRPPWMGLLGPTIQAEVYDTVVITLKNMASHPVSLHA |
| Pat. No. | VGVSYWKASEGAEYDDQTSQREKEDDKVFPGGSHTYVWQVLKENGPMASDPLCLTYS |
| 7,632,921, SEQ | YLSHVDLVKDLNSGLIGALLVCREGSLAKEKTQTLHKFILLFAVFDEGKSWHSETKNSL |
| ID NO: 3) | MQDRDAASARAWPKMHTVNGYVNRSLPGLIGCHRKSVYWHVIGMGTTPEVHSIFLEG |
| | HTFLVRNHRQASLEISPITFLTAQTLLMDLGQFLLFCHISSHQHDGMEAYVKVDSCPEEP |
| | QLRMKNNEEAEDYDDDLTDSEMDVVRFDDDNSPSFIQIRSVAKKHPKTWVHYIAAEEE |
| | DWDYAPLVLAPDDRSYKSQYLNNGPQRIGRKYKKVRFMAYTDETFKTREAIQHESGIL |
| | GPLLYGEVGDTLLIIFKNQASRPYNIYPHGITDVRPLYSRRLPKGVKHLKDFPILPGEIFKY |
| | KWTVTVEDGPTKSDPRCLTRYYSSFVNMERDLASGLIGPLLICYKESVDQRGNQIMSDK |
| | RNVILFSVFDENRSWYLTENIQRFLPNPAGVQLEDPEFQASNIMHSINGYVFDSLQLSVC |
| | LHEVAYWYILSIGAQTDFLSVFFSGYTFKHKMVYEDTLTLFPFSGETVFMSMENPGLWI |
| | LGCHNSDFRNRGMTALLKVSSCDKNTGDYYEDSYEDISAYLLSKNNAIEPRSFSQNPPV |
| | LKRHQREITRTTLQSDQEEIDYDDTISVEMKKEDFDIYDEDENQSPRSFQKKTRHYFIAA |
| | VERLWDYGMSSSPHVLRNRAQSGSVPQFKKVVFQEFTDGSFTQPLYRGELNEHLGLLG |
| | PYIRAEVEDNIMVTFRNQASRPYSFYSSLISYEEDQRQGAEPRKNFVKPNETKTYFWKV |
| | QHHMAPTKDEFDCKAWAYFSDVDLEKDVHSGLIGPLLVCHTNTLNPAHGRQVTVQEF |
| | ALFFTIFDETKSWYFTENMERNCRAPCNIQMEDPTFKENYRFHAINGYIMDTLPGLVMA |
| | QDQRIRWYLLSMGSNENIHSIHFSGHVFTVRKKEEYKMALYNLYPGVFETVEMLPSKA |
| | GIWRVECLIGEHLHAGMSTLFLVYSNKCQTPLGMASGHIRDFQITASGQYGQWAPKLA |
| | RLHYSGSINAWSTKEPFSWIKVDLLAPMIIHGIKTQGARQKFSSLYISQFIIMYSLDGKKW |
| | QTYRGNSTGTLMVFFGNVDSSGIKHNIFNPPIIARYIRLHPTHYSIRSTLRMELMGCDLNS |
| | CSMPLGMESKAISDAQITASSYFTNMFATWSPSKARLHLQGRSNAWRPQVNNPKEWLQ |
| | VDFQKTMKVTGVTTQGVKSLLTSMYVKEFLISSSQDGHQWTLFFQNGKVKVFQGNQD |
| | SFTPVVNSLDPPLLTRYLRIHPQSWVHQIALRMEVLGCEAQDLY |
| FVIII BDD-2 | ATRRYYLGAVELSWDYMQSDLGELPVDARFPPRVPKSFPFNTSVVYKKTLFVEFTVHLF |
| | NIAKPRPPWMGLLGPTIQAEVYDTVVITLKNMASHPVSLHAVGVSYWKASEGAEYDDQ |
| | TSQREKEDDKVFPGGSHTYVWQVLKENGPMASDPLCLTYSYLSHVDLVKDLNSGLIGA |
| | LLVCREGSLAKEKTQTLHKFILLFAVFDEGKSWHSETKNSLMQDRDAASARAWPKMHT |
| | VNGYVNRSLPGLIGCHRKSVYWHVIGMGTTPEVHSIFLEGHTFLVRNHRQASLEISPITFL |
| | TAQTLLMDLGQFLLFCHISSHQHDGMEAYVKVDSCPEEPQLRMKNNEEAEDYDDDLTD |
| | SEMDVVRFDDDNSPSFIQIRSVAKKHPKTWVHYIAAEEEDWDYAPLVLAPDDRSYKSQ |
| | YLNNGPQRIGRKYKKVRFMAYTDETFKTREAIQHESGILGPLLYGEVGDTLLIIFKNQAS |
| | RPYNIYPHGITDVRPLYSRRLPKGVKHLKDFPILPGEIFKYKWTVTVEDGPTKSDPRCLT |
| | RYYSSFVNMERDLASGLIGPLLICYKESVDQRGNQIMSDKRNVILFSVFDENRSWYLTEN |
| | IQRFLPNPAGVQLEDPEFQASNIMHSINGYVFDSLQLSVCLHEVAYWYILSIGAQTDFLS |
| | VFFSGYTFKHKMVYEDTLTLFPFSGETVFMSMENPGLWILGCHNSDFRNRGMTALLKV |
| | SSCDKNTGDYYEDSYEDISAYLLSKNNAIEPRSFSQNPPVLKRHQREITRTTLQSDQEEID |
| | YDDTISVEMKKEDFDIYDEDENQSPRSFQKKTRHYFIAAVERLWDYGMSSSPHVLRNRA |
| | QSGSVPQFKKVVFQEFTDGSFTQPLYRGELNEHLGLLGPYIRAEVEDNIMVTFRNQASRP |
| | YSFYSSLISYEEDQRQGAEPRKNFVKPNETKTYFWKVQHHMAPTKDEFDCKAWAYFSD |
| | VDLEKDVHSGLIGPLLVCHTNTLNPAHGRQVTVQEFALFFTIFDETKSWYFTENMERNC |
| | RAPCNIQMEDPTFKENYRFHAINGYIMDTLPGLVMAQDQRIRWYLLSMGSNENIHSIHFS |
| | GHVFTVRKKEEYKMALYNLYPGVFETVEMLPSKAGIWRVECLIGEHLHAGMSTLFLVY |
| | SNKCQTPLGMASGHIRDFQITASGQYGQWAPKLARLHYSGSINAWSTKEPFSWIKVDLL |
| | APMIIHGIKTQGARQKFSSLYISQFIIMYSLDGKKWQTYRGNSTGTLMVFFGNVDSSGIK |
| | HNIFNPPIIARYIRLHPTHYSIRSTLRMELMGCDLNSCSMPLGMESKAISDAQITASSYFTN |
| | MFATWSPSKARLHLQGRSNAWRPQVNNPKEWLQVDFQKTMKVTGVTTQGVKSLLTS |
| | MYVKEFLISSSQDGHQWTLFFQNGKVKVFQGNQDSFTPVVNSLDPPLLTRYLRIHPQSW |
| | VHQIALRMEVLGCEAQDLY |
| FVIII BDD-3 | ATRRYYLGAVELSWDYMQSDLGELPVDARFPPRVPKSFPFNTSVVYKKTLFVEFTVHLF |
| (G1648) | NIAKPRPPWMGLLGPTIQAEVYDTVVITLKNMASHPVSLHAVGVSYWKASEGAEYDDQ |
| | TSQREKEDDKVFPGGSHTYVWQVLKENGPMASDPLCLTYSYLSHVDLVKDLNSGLIGA |
| | LLVCREGSLAKEKTQTLHKFILLFAVFDEGKSWHSETKNSLMQDRDAASARAWPKMHT |
| | VNGYVNRSLPGLIGCHRKSVYWHVIGMGTTPEVHSIFLEGHTFLVRNHRQASLEISPITFL |
| | TAQTLLMDLGQFLLFCHISSHQHDGMEAYVKVDSCPEEPQLRMKNNEEAEDYDDDLTD |
| | SEMDVVRFDDDNSPSFIQIRSVAKKHPKTWVHYIAAEEEDWDYAPLVLAPDDRSYKSQ |
| | YLNNGPQRIGRKYKKVRFMAYTDETFKTREAIQHESGILGPLLYGEVGDTLLIIFKNQAS |
| | RPYNIYPHGITDVRPLYSRRLPKGVKHLKDFPILPGEIFKYKWTVTVEDGPTKSDPRCLT |
| | RYYSSFVNMERDLASGLIGPLLICYKESVDQRGNQIMSDKRNVILFSVFDENRSWYLTEN |
| | IQRFLPNPAGVQLEDPEFQASNIMHSINGYVFDSLQLSVCLHEVAYWYILSIGAQTDFLS |
| | VFFSGYTFKHKMVYEDTLTLFPFSGETVFMSMENPGLWILGCHNSDFRNRGMTALLKV |
| | SSCDKNTGDYYEDSYEDISAYLLSKNNAIEPRSFSQNPPVLKRHQGEITRTTLQSDQEEID |
| | YDDTISVEMKKEDFDIYDEDENQSPRSFQKKTRHYFIAAVERLWDYGMSSSPHVLRNRA |
| | QSGSVPQFKKVVFQEFTDGSFTQPLYRGELNEHLGLLGPYIRAEVEDNIMVTFRNQASRP |
| | YSFYSSLISYEEDQRQGAEPRKNFVKPNETKTYFWKVQHHMAPTKDEFDCKAWAYFSD |
| | VDLEKDVHSGLIGPLLVCHTNTLNPAHGRQVTVQEFALFFTIFDETKSWYFTENMERNC |
| | RAPCNIQMEDPTFKENYRFHAINGYIMDTLPGLVMAQDQRIRWYLLSMGSNENIHSIHFS |
| | GHVFTVRKKEEYKMALYNLYPGVFETVEMLPSKAGIWRVECLIGEHLHAGMSTLFLVY |
| | SNKCQTPLGMASGHIRDFQITASGQYGQWAPKLARLHYSGSINAWSTKEPFSWIKVDLL |
| | APMIIHGIKTQGARQKFSSLYISQFIIMYSLDGKKWQTYRGNSTGTLMVFFGNVDSSGIK |
| | HNIFNPPIIARYIRLHPTHYSIRSTLRMELMGCDLNSCSMPLGMESKAISDAQITASSYFTN |
| | MFATWSPSKARLHLQGRSNAWRPQVNNPKEWLQVDFQKTMKVTGVTTQGVKSLLTS |
| | MYVKEFLISSSQDGHQWTLFFQNGKVKVFQGNQDSFTPVVNSLDPPLLTRYLRIHPQSW |
| | VHQIALRMEVLGCEAQDLY |
| FVIII BDD-4 | ATRRYYLGAVELSWDYMQSDLGELPVDARFPPRVPKSFPFNTSVVYKKTLFVEFTVHLF |
| | NIAKPRPPWMGLLGPTIQAEVYDTVVITLKNMASHPVSLHAVGVSYWKASEGAEYDDQ |
| | TSQREKEDDKVFPGGSHTYVWQVLKENGPMASDPLCLTYSYLSHVDLVKDLNSGLIGA |
| | LLVCREGSLAKEKTQTLHKFILLFAVFDEGKSWHSETKNSLMQDRDAASARAWPKMHT |
| | VNGYVNRSLPGLIGCHRKSVYWHVIGMGTTPEVHSIFLEGHTFLVRNHRQASLEISPITFL |
| | TAQTLLMDLGQFLLFCHISSHQHDGMEAYVKVDSCPEEPQLRMKNNEEAEDYDDDLTD |
| | SEMDVVRFDDDNSPSFIQIRSVAKKHPKTWVHYIAAEEEDWDYAPLVLAPDDRSYKSQ |
| | YLNNGPQRIGRKYKKVRFMAYTDETFKTREAIQHESGILGPLLYGEVGDTLLIIFKNQAS |
| | RPYNIYPHGITDVRPLYSRRLPKGVKHLKDFPILPGEIFKYKWTVTVEDGPTKSDPRCLT |
| | RYYSSFVNMERDLASGLIGPLLICYKESVDQRGNQIMSDKRNVILFSVFDENRSWYLTEN |
| | IQRFLPNPAGVQLEDPEFQASNIMHSINGYVFDSLQLSVCLHEVAYWYILSIGAQTDFLS |
| | VFFSGYTFKHKMVYEDTLTLFPFSGETVFMSMENPGLWILGCHNSDFRNRGMTALLKV |
| | SSCDKNTGDYYEDSYEDISAYLLSKNNAIEPRSFSQQSPRSFQKKTRHYFIAAVERLWDY |
| | GMSSSPHVLRNRAQSGSVPQFKKVVFQEFTDGSFTQPLYRGELNEHLGLLGPYIRAEVE |
| | DNIMVTFRNQASRPYSFYSSLISYEEDQRQGAEPRKNFVKPNETKTYFWKVQHHMAPT |
| | KDEFDCKAWAYFSDVDLEKDVHSGLIGPLLVCHTNTLNPAHGRQVTVQEFALFFTIFDE |
| | TKSWYFTENMERNCRAPCNIQMEDPTFKENYRFHAINGYIMDTLPGLVMAQDQRIRWY |
| | LLSMGSNENIHSIHFSGHVFTVRKKEEYKMALYNLYPGVFETVEMLPSKAGIWRVECLI |
| | GEHLHAGMSTLFLVYSNKCQTPLGMASGHIRDFQITASGQYGQWAPKLARLHYSGSIN |
| | AWSTKEPFSWIKVDLLAPMIIHGIKTQGARQKFSSLYISQFIIMYSLDGKKWQTYRGNST |
| | GTLMVFFGNVDSSGIKHNIFNPPIIARYIRLHPTHYSIRSTLRMELMGCDLNSCSMPLGME |
| | SKAISDAQITASSYFTNMFATWSPSKARLHLQGRSNAWRPQVNNPKEWLQVDFQKTMK |
| | VTGVTTQGVKSLLTSMYVKEFLISSSQDGHQWTLFFQNGKVKVFQGNQDSFTPVVNSL |
| | DPPLLTRYLRIHPQSWVHQIALRMEVLGCEAQDLY |
| FVIII BDD-5 | ATRRYYLGAVELSWDYMQSDLGELPVDARFPPRVPKSFPFNTSVVYKKTLFVEFTVHLF |
| | NIAKPRPPWMGLLGPTIQAEVYDTVVITLKNMASHPVSLHAVGVSYWKASEGAEYDDQ |
| | TSQREKEDDKVFPGGSHTYVWQVLKENGPMASDPLCLTYSYLSHVDLVKDLNSGLIGA |
| | LLVCREGSLAKEKTQTLHKFILLFAVFDEGKSWHSETKNSLMQDRDAASARAWPKMHT |
| | VNGYVNRSLPGLIGCHRKSVYWHVIGMGTTPEVHSIFLEGHTFLVRNHRQASLEISPITFL |
| | TAQTLLMDLGQFLLFCHISSHQHDGMEAYVKVDSCPEEPQLRMKNNEEAEDYDDDLTD |
| | SEMDVVRFDDDNSPSFIQIRSVAKKHPKTWVHYIAAEEEDWDYAPLVLAPDDRSYKSQ |
| | YLNNGPQRIGRKYKKVRFMAYTDETFKTREAIQHESGILGPLLYGEVGDTLLIIFKNQAS |
| | RPYNIYPHGITDVRPLYSRRLPKGVKHLKDFPILPGEIFKYKWTVTVEDGPTKSDPRCLT |
| | RYYSSFVNMERDLASGLIGPLLICYKESVDQRGNQIMSDKRNVILFSVFDENRSWYLTEN |
| | IQRFLPNPAGVQLEDPEFQASNIMHSINGYVFDSLQLSVCLHEVAYWYILSIGAQTDFLS |
| | VFFSGYTFKHKMVYEDTLTLFPFSGETVFMSMENPGLWILGCHNSDFRNRGMTALLKV |
| | SSCDKQSPRSFQKKTRHYFIAAVERLWDYGMSSSPHVLRNRAQSGSVPQFKKVVFQEFT |
| | DGSFTQPLYRGELNEHLGLLGPYIRAEVEDNIMVTFRNQASRPYSFYSSLISYEEDQRQG |
| | AEPRKNFVKPNETKTYFWKVQHHMAPTKDEFDCKAWAYFSDVDLEKDVHSGLIGPLL |
| | VCHTNTLNPAHGRQVTVQEFALFFTIFDETKSWYFTENMERNCRAPCNIQMEDPTFKEN |
| | YRFHAINGYIMDTLPGLVMAQDQRIRWYLLSMGSNENIHSIHFSGHVFTVRKKEEYKM |
| | ALYNLYPGVFETVEMLPSKAGIWRVECLIGEHLHAGMSTLFLVYSNKCQTPLGMASGHI |
| | RDFQITASGQYGQWAPKLARLHYSGSINAWSTKEPFSWIKVDLLAPMIIHGIKTQGARQ |
| | KFSSLYISQFIIMYSLDGKKWQTYRGNSTGTLMVFFGNVDSSGIKHNIFNPPIIARYIRLHP |
| | THYSIRSTLRMELMGCDLNSCSMPLGMESKAISDAQITASSYFTNMFATWSPSKARLHL |
| | QGRSNAWRPQVNNPKEWLQVDFQKTMKVTGVTTQGVKSLLTSMYVKEFLISSSQDGH |
| | QWTLFFQNGKVKVFQGNQDSFTPVVNSLDPPLLTRYLRIHPQSWVHQIALRMEVLGCE |
| | AQDLY |
| FVIII BDD-6 | ATRRYYLGAVELSWDYMQSDLGELPVDARFPPRVPKSFPFNTSVVYKKTLFVEFTDHLF |
| | NIAKPRPPWMGLLGPTIQAEVYDTVVITLKNMASHPVSLHAVGVSYWKASEGAEYDDQ |
| | TSQREKEDDKVFPGGSHTYVWQVLKENGPMASDPLCLTYSYLSHVDLVKDLNSGLIGA |
| | LLVCREGSLAKEKTQTLHKFILLFAVFDEGKSWHSETKNSLMQDRDAASARAWPKMHT |
| | VNGYVNRSLPGLIGCHRKSVYWHVIGMGTTPEVHSIFLEGHTFLVRNHRQASLEISPITFL |
| | TAQTLLMDLGQFLLFCHISSHQHDGMEAYVKVDSCPEEPQLRMKNNEEAEDYDDDLTD |
| | SEMDVVRFDDDNSPSFIQIRSVAKKHPKTWVHYIAAEEEDWDYAPLVLAPDDRSYKSQ |
| | YLNNGPQRIGRKYKKVRFMAYTDETFKTREAIQHESGILGPLLYGEVGDTLLIIFKNQAS |
| | RPYNIYPHGITDVRPLYSRRLPKGVKHLKDFPILPGEIFKYKWTVTVEDGPTKSDPRCLT |
| | RYYSSFVNMERDLASGLIGPLLICYKESVDQRGNQIMSDKRNVILFSVFDENRSWYLTEN |
| | IQRFLPNPAGVQLEDPEFQASNIMHSINGYVFDSLQLSVCLHEVAYWYILSIGAQTDFLS |
| | VFFSGYTFKHKMVYEDTLTLFPFSGETVFMSMENPGLWILGCHNSDFRNRGMTALLKV |
| | SSCDKNTGDYYEDSYEDISAYLLSKNNAIEPRSFSQNSRHPSTRQKQFNATTIPENDIEKT |
| | DTISVEMKKEDFDIYDEDENQSPRSFQKKTRHYFIAAVERLWDYGMSSSPHVLRNRAQS |
| | GSVPQFKKVVFQEFTDGSFTQPLYRGELNEHLGLLGPYIRAEVEDNIMVTFRNQASRPYS |
| | FYSSLISYEEDQRQGAEPRKNFVKPNETKTYFWKVQHHMAPTKDEFDCKAWAYFSDVD |
| | LEKDVHSGLIGPLLVCHTNTLNPAHGRQVTVQEFALFFTIFDETKSWYFTENMERNCRA |
| | PCNIQMEDPTFKENYRFHAINGYIMDTLPGLVMAQDQRIRWYLLSMGSNENIHSIHFSG |
| | HVFTVRKKEEYKMALYNLYPGVFETVEMLPSKAGIWRVECLIGEHLHAGMSTLFLVYS |
| | NKCQTPLGMASGHIRDFQITASGQYGQWAPKLARLHYSGSINAWSTKEPFSWIKVDLLA |
| | PMIIHGIKTQGARQKFSSLYISQFIIMYSLDGKKWQTYRGNSTGTLMVFFGNVDSSGIKH |
| | NIFNPPIIARYIRLHPTHYSIRSTLRMELMGCDLNSCSMPLGMESKAISDAQITASSYFTN |
| | MFATWSPSKARLHLQGRSNAWRPQVNNPKEWLQVDFQKTMKVTGVTTQGVKSLLTS |
| | MYVKEFLISSSQDGHQWTLFFQNGKVKVFQGNQDSFTPVVNSLDPPLLTRYLRIHPQSW |
| | VHQIALRMEVLGCEAQDLY |
| FVIII BDD-7 | ATRRYYLGAVELSWDYMQSDLGELPVDARFPPRVPKSFPFNTSVVYKKTLFVEFTVHLF |
| | NIAKPRPPWMGLLGPTIQAEVYDTVVITLKNMASHPVSLHAVGVSYWKASEGAEYDDQ |
| | TSQREKEDDKVFPGGSHTYVWQVLKENGPMASDPLCLTYSYLSHVDLVKDLNSGLIGA |
| | LLVCREGSLAKEKTQTLHKFILLFAVFDEGKSWHSETKNSLMQDRDAASARAWPKMHT |
| | VNGYVNRSLPGLIGCHRKSVYWHVIGMGTTPEVHSIFLEGHTFLVRNHRQASLEISPITFL |
| | TAQTLLMDLGQFLLFCHISSHQHDGMEAYVKVDSCPEEPQLRMKNNEEAEDYDDDLTD |
| | SEMDVVRFDDDNSPSFIQIRSVAKKHPKTWVHYIAAEEEDWDYAPLVLAPDDRSYKSQ |
| | YLNNGPQRIGRKYKKVRFMAYTDETFKTREAIQHESGILGPLLYGEVGDTLLIIFKNQAS |
| | RPYNIYPHGITDVRPLYSRRLPKGVKHLKDFPILPGEIFKYKWTVTVEDGPTKSDPRCLT |
| | RYYSSFVNMERDLASGLIGPLLICYKESVDQRGNQIMSDKRNVILFSVFDENRSWYLTEN |
| | IQRFLPNPAGVQLEDPEFQASNIMHSINGYVFDSLQLSVCLHEVAYWYILSIGAQTDFLS |
| | VFFSGYTFKHKMVYEDTLTLFPFSGETVFMSMENPGLWILGCHNSDFRNRGMTALLKV |
| | SSCDKNTGDYYEDSYEDISAYLLSKNNAIEPRSFSQSPRSFQKKTRHYFIAAVERLWDYG |
| | MSSSPHVLRNRAQSGSVPQFKKVVFQEFTDGSFTQPLYRGELNEHLGLLGPYIRAEVED |
| | NIMVTFRNQASRPYSFYSSLISYEEDQRQGAEPRKNFVKPNETKTYFWKVQHHMAPTK |
| | DEFDCKAWAYFSDVDLEKDVHSGLIGPLLVCHTNTLNPAHGRQVTVQEFALFFTIFDET |
| | KSWYFTENMERNCRAPCNIQMEDPTFKENYRFHAINGYIMDTLPGLVMAQDQRIRWYL |
| | LSMGSNENIHSIHFSGHVFTVRKKEEYKMALYNLYPGVFETVEMLPSKAGIWRVECLIG |
| | EHLHAGMSTLFLVYSNKCQTPLGMASGHIRDFQITASGQYGQWAPKLARLHYSGSINA |
| | WSTKEPFSWIKVDLLAPMIIHGIKTQGARQKFSSLYISQFIIMYSLDGKKWQTYRGNSTG |
| | TLMVFFGNVDSSGIKHNIFNPPIIARYIRLHPTHYSIRSTLRMELMGCDLNSCSMPLGMES |
| | KAISDAQITASSYFTNMFATWSPSKARLHLQGRSNAWRPQVNNPKEWLQVDFQKTMK |
| | VTGVTTQGVKSLLTSMYVKEFLISSSQDGHQWTLFFQNGKVKVFQGNQDSFTPVVNSL |
| | DPPLLTRYLRIHPQSWVHQIALRMEVLGCEAQDLY |
| FVIII BDD-8 | MQIELSTCFFLCLLRFCFSATRRYYLGAVELSWDYMQSDLGELPVDARFPPRVPKSFPFN |
| precursor | TSVVYKKTLFVEFTDHLFNIAKPRPPWMGLLGPTIQAEVYDTVVITLKNMASHPVSLHA |
| (U.S. Pat. No. | VGVSYWKASEGAEYDDQTSQREKEDDKVFPGGSHTYVWQVLKENGPMASDPLCLTYS |
| 6,818,439 SEQ | YLSHVDLVKDLNSGLIGALLVCREGSLAKEKTQTLHKFILLFAVFDEGKSWHSETKNSL |
| ID NO: 47) | MQDRDAASARAWPKMHTVNGYVNRSLPGLIGCHRKSVYWHVIGMGTTPEVHSIFLEG |
| | HTFLVRNHRQASLEISPITFLTAQTLLMDLGQFLLFCHISSHQHDGMEAYVKVDSCPEEP |
| | QLRMKNNEEAEDYDDDLTDSEMDVVRFDDDNSPSFIQIRSVAKKHPKTWVHYIAAEEE |
| | DWDYAPLVLAPDDRSYKSQYLNNGPQRIGRKYKKVRFMAYTDETFKTREAIQHESGIL |
| | GPLLYGEVGDTLLIIFKNQASRPYNIYPHGITDVRPLYSRRLPKGVKHLKDFPILPGEIFKY |
| | KWTVTVEDGPTKSDPRCLTRYYSSFVNMERDLASGLIGPLLICYKESVDQRGNQIMSDK |
| | RNVILFSVFDENRSWYLTENIQRFLPNPAGVQLEDPEFQASNIMHSINGYVFDSLQLSVC |
| | LHEVAYWYILSIGAQTDFLSVFFSGYTFKHKMVYEDTLTLFPFSGETVFMSMENPGLWI |
| | LGCHNSDFRNRGMTALLKVSSCDKNTGDYYEDSYEDISAYLLSKNNAIEPRSFSQNPPV |
| | LKRHQREITRTTLQSDQEEIDYDDTISVEMKKEDFDIYDEDENQSPRSFQKKTRHYFIAA |
| | VERLWDYGMSSSPHVLRNRAQSGSVPQFKKVVFQEFTDGSFTQPLYRGELNEHLGLLG |
| | PYIRAEVEDNIMVTFRNQASRPYSFYSSLISYEEDQRQGAEPRKNFVKPNETKTYFWKV |
| | QHHMAPTKDEFDCKAWAYFSDVDLEKDVHSGLIGPLLVCHTNTLNPAHGRQVTVQEF |
| | ALFFTIFDETKSWYFTENMERNCRAPCNIQMEDPTFKENYRFHAINGYIMDTLPGLVMA |
| | QDQRIRWYLLSMGSNENIHSIHFSGHVFTVRKKEEYKMALYNLYPGVFETVEMLPSKA |
| | GIWRVECLIGEHLHAGMSTLFLVYSNKCQTPLGMASGHIRDFQITASGQYGQWAPKLA |
| | RLHYSGSINAWSTKEPFSWIKVDLLAPMIIHGIKTQGARQKFSSLYISQFIIMYSLDGKKW |
| | QTYRGNSTGTLMVFFGNVDSSGIKHNIFNPPIIARYIRLHPTHYSIRSTLRMELMGCDLNS |
| | CSMPLGMESKAISDAQITASSYFTNMFATWSPSKARLHLQGRSNAWRPQVNNPKEWLQ |
| | VDFQKTMKVTGVTTQGVKSLLTSMYVKEFLISSSQDGHQWTLFFQNGKVKVFQGNQD |
| | SFTPVVNSLDPPLLTRYLRIHPQSWVHQIALRMEVLGCEAQDLY |
| FVIII BDD-9 | ATRRYYLGAVELSWDYMQSDLGELPVDARFPPRVPKSFPFNTSVVYKKTLFVEFTDHLF |
| mature | NIAKPRPPWMGLLGPTIQAEVYDTVVITLKNMASHPVSLHAVGVSYWKASEGAEYDDQ |
| (U.S. Pat. No. | TSQREKEDDKVFPGGSHTYVWQVLKENGPMASDPLCLTYSYLSHVDLVKDLNSGLIGA |
| 6,818,439) | LLVCREGSLAKEKTQTLHKFILLFAVFDEGKSWHSETKNSLMQDRDAASARAWPKMHT |
| | VNGYVNRSLPGLIGCHRKSVYWHVIGMGTTPEVHSIFLEGHTFLVRNHRQASLEISPITFL |
| | TAQTLLMDLGQFLLFCHISSHQHDGMEAYVKVDSCPEEPQLRMKNNEEAEDYDDDLTD |
| | SEMDVVRFDDDNSPSFIQIRSVAKKHPKTWVHYIAAEEEDWDYAPLVLAPDDRSYKSQ |
| | YLNNGPQRIGRKYKKVRFMAYTDETFKTREAIQHESGILGPLLYGEVGDTLLIIFKNQAS |
| | RPYNIYPHGITDVRPLYSRRLPKGVKHLKDFPILPGEIFKYKWTVTVEDGPTKSDPRCLT |
| | RYYSSFVNMERDLASGLIGPLLICYKESVDQRGNQIMSDKRNVILFSVFDENRSWYLTEN |
| | IQRFLPNPAGVQLEDPEFQASNIMHSINGYVFDSLQLSVCLHEVAYWYILSIGAQTDFLS |
| | VFFSGYTFKHKMVYEDTLTLFPFSGETVFMSMENPGLWILGCHNSDFRNRGMTALLKV |
| | SSCDKNTGDYYEDSYEDISAYLLSKNNAIEPRSFSQNPPVLKRHQREITRTTLQSDQEEID |
| | YDDTISVEMKKEDFDIYDEDENQSPRSFQKKTRHYFIAAVERLWDYGMSSSPHVLRNRA |
| | QSGSVPQFKKVVFQEFTDGSFTQPLYRGELNEHLGLLGPYIRAEVEDNIMVTFRNQASRP |
| | YSFYSSLISYEEDQRQGAEPRKNFVKPNETKTYFWKVQHHMAPTKDEFDCKAWAYFSD |
| | VDLEKDVHSGLIGPLLVCHTNTLNPAHGRQVTVQEFALFFTIFDETKSWYFTENMERNC |
| | RAPCNIQMEDPTFKENYRFHAINGYIMDTLPGLVMAQDQRIRWYLLSMGSNENIHSIHFS |
| | GHVFTVRKKEEYKMALYNLYPGVFETVEMLPSKAGIWRVECLIGEHLHAGMSTLFLVY |
| | SNKCQTPLGMASGHIRDFQITASGQYGQWAPKLARLHYSGSINAWSTKEPFSWIKVDLL |
| | APMIIHGIKTQGARQKFSSLYISQFIIMYSLDGKKWQTYRGNSTGTLMVFFGNVDSSGIK |
| | HNIFNPPIIARYIRLHPTHYSIRSTLRMELMGCDLNSCSMPLGMESKAISDAQITASSYFTN |
| | MFATWSPSKARLHLQGRSNAWRPQVNNPKEWLQVDFQKTMKVTGVTTQGVKSLLTS |
| | MYVKEFLISSSQDGHQWTLFFQNGKVKVFQGNQDSFTPVVNSLDPPLLTRYLRIHPQSW |
| | VHQIALRMEVLGCEAQDLY |

[0230] The present invention also contemplates CFXTEN comprising FVIII with various amino acid deletions, insertions and substitutions made in the FVIII sequences of Table 1 and Table 31 that retain procoagulant activity. Examples of conservative substitutions for amino acids in polypeptide sequences are shown in Table 2. In embodiments of the CFXTEN in which the sequence identity of the FVIII is less than 100% compared to a specific sequence disclosed herein, the invention contemplates substitution of any of the other 19 natural L-amino acids for a given amino acid residue of the given FVIII, which may be at any position within the sequence of the FVIII, including adjacent amino acid residues. If any one substitution results in an undesirable change in procoagulant activity, then one of the alternative amino acids can be employed and the construct protein evaluated by the methods described herein (e.g., the assays of Table 27), or using any of the techniques and guidelines for conservative and non-conservative mutations set forth, for instance, in U.S. Pat. No. 5,364,934, the content of which is incorporated by reference in its entirety, or using methods generally known in the art. In addition, variants can include, for instance, polypeptides wherein one or more amino acid residues are added or deleted at the N- or C-terminus of the full-length native amino acid sequence or of a domain of a FVIII that retains some if not all of the procoagulant activity of the native peptide, e.g., the ability to associate with another coagulation factor and/or participate in the coagulation cascade, leading to fibrin formation and hemostasis. The resulting FVIII sequences that retain at least a portion (e.g., at least 10%, 20%, 30%, 40%, 50%, 60%, 70%, 80%, 90%, or at least 95% or more) of the procoagulant activity in comparison to native circulating FVIII are considered useful for the fusion protein compositions of this invention. Such FVIII variants are known in the art, including those described in U.S. Pat. and application Nos. 6,316,226; 6,818,439; 7,632,921; 20080227691, which are incorporated herein by reference in one embodiment, a FVIII sequence variant has an aspartic acid substituted for valine at amino acid position 75 (numbered relative to the native mature form of FVIII).

TABLE 2
Exemplary conservative amino acid substitutions

| Original Residue | Exemplary Substitutions |
|---|---|
| Ala (A) | val; leu; ile |
| Arg (R) | lys; gln; asn |
| Asn (N) | gin; his; lys; arg |
| Asp (D) | Glu |
| Cys (C) | Ser |
| Gln (Q) | Asn |
| Glu (E) | Asp |
| Gly (G) | Pro |
| His (H) | asn: gin: lys: arg |
| Ile (I) | leu; val; met; ala; phe: norleucine |
| Leu (L) | norleucine: ile: val; met; ala: phe |
| Lys (K) | arg: gin: asn |
| Met (M) | leu; phe; ile |
| Phe (F) | leu: val: ile; ala |
| Pro (P) | Gly |
| Ser (S) | Thr |
| Thr (T) | Ser |
| Trp (W) | Tyr |
| Tyr(Y) | Trp: phe: thr: ser |
| Val (V) | Ile; leu; met; phe; ala; norleucine |

### III). Extended Recombinant Polypeptides

[0231] In one aspect, the invention provides XTEN polypeptide compositions that are useful as fusion protein partner(s) to link to and/or incorporate within a FVIII polypeptide, resulting in a CFXTEN fusion protein. XTEN are generally polypeptides with non-naturally occurring, substantially non-repetitive sequences having a low degree of or no secondary or tertiary structure under physiologic conditions. In one aspect, XTEN typically has from about 36 to about 3000 amino acids, and of which the majority are small hydrophilic amino acids. As used herein, “XTEN” specifically excludes whole antibodies or antibody fragments (e.g. single-chain antibodies and Fc fragments). XTEN polypeptides have utility as a fusion protein partners in that they serve in various roles, conferring certain desirable pharmacokinetic, physicochemical and pharmaceutical properties when linked to a FVIII protein to a create a CFXTEN fusion protein. Such CFXTEN fusion protein compositions have enhanced properties compared to the corresponding FVIII not linked to XTEN, making them useful in the treatment of certain diseases, disorders or conditions related to FVIII deficiencies or bleeding disorders, as more fully described below.

[0232] The selection criteria for the XTEN to be fused to the FVIII proteins used to create the inventive fusion proteins compositions generally relate to attributes of physical/chemical properties and conformational structure of the XTEN that is, in turn, used to confer the enhanced pharmaceutical and pharmacokinetic properties to the fusion proteins compositions. The unstructured characteristic and physical/chemical properties of the XTEN result, at least, in part, from the overall amino acid composition, the non-repetitive design, and the length of the XTEN polypeptide. The properties of XTEN are not tied to absolute amino acid sequences as evidenced by the diversity of the exemplary sequences of Table 4 that, within varying ranges of length, possess similar properties. The XTEN of the present invention may exhibit one or more, or all of the following advantageous properties: unstructured conformation, conformational flexibility, enhanced aqueous solubility, high degree of protease resistance, low immunogenicity, low binding to mammalian receptors, a defined degree of charge, and increased hydrodynamic (or Stokes) radii; properties that can make them particularly useful as fusion protein partners. Non-limiting examples of the enhanced properties of the fusion proteins comprising FVIII fused to XTEN, compared to FVIII not linked to XTEN, include increases in the overall solubility and/or metabolic stability, reduced susceptibility to proteolysis, reduced immunogenicity, reduced rate of absorption when administered subcutaneously or intramuscularly, reduced binding to FVIII clearance receptors, enhanced interactions with substrate, and/or enhanced pharmacokinetic properties when administered to a subject Enhanced pharmacokinetic properties of the CFXTEN compositions compared to FVIII not linked to XTEN include longer terminal half-life (e.g., two-fold, three-fold, four-fold or more), increased area under the curve (AUC) (e.g., 25%, 50%, 100% or more), lower volume of distribution, and enhanced absorption after subcutaneous or intramuscular injection (an advantage compared to commercially-available forms of FVIII that must be administered intravenously). In addition, it is specifically contemplated that the CFXTEN compositions comprising cleavage sequences (described more fully, below) permit sustained release of biologically active FVIII, such that the administered CFXTEN acts as a depot. It is specifically contemplated that the inventive CFXTEN fusion proteins can exhibit one or more or any combination of the improved properties disclosed herein. As a result of these enhanced properties, it is believed that CFXTEN compositions permit less frequent dosing compared to FVIII not linked to XTEN and administered at a comparable dose. Such CFXTEN fusion protein compositions have utility to treat certain factor VIII-related diseases, disorders or conditions, as described herein.

[0233] A variety of methods and assays are known in the art for determining the physical/chemical properties of proteins such as the CFXTEN compositions comprising XTEN. Such properties include but are not limited to secondary or tertiary structure, solubility, protein aggregation, melting properties, contamination and water content. Such methods include analytical centrifugation, EPR, HPLC-ion exchange, HPLC-size exclusion, HPLC-reverse phase, light scattering, capillary electrophoresis, circular dichroism, differential scanning calorimetry, fluorescence, HPLC-ion exchange, HPLC-size exclusion, IR, NMR, Raman spectroscopy, refractometry, and UV/Visible spectroscopy. Additional methods are disclosed in Arnau, et al., Prot Expr and Purif (2006) 48, 1-13.

[0234] The XTEN component(s) of the CFXTEN are designed to behave like denatured peptide sequences under physiological conditions, despite the extended length of the polymer. “Denatured” describes the state of a peptide in solution that is characterized by a large conformational freedom of the peptide backbone. Most peptides and proteins adopt a denatured conformation in the presence of high concentrations of denaturants or at elevated temperature. Peptides in denatured conformation have, for example, characteristic circular dichroism (CD) spectra and are characterized by a lack of long-range interactions as determined by NMR. “Denatured conformation” and “unstructured conformation” are used synonymously herein. In some embodiments, the invention provides XTEN sequences that, under physiologic conditions, are largely devoid of secondary structure. In other cases, the XTEN sequences are substantially devoid of secondary structure under physiologic conditions. “Largely devoid,” as used in this context, means that at least 50% of the XTEN amino acid residues of the XTEN sequence do not contribute to secondary structure as measured or determined by the means described herein. “Substantially devoid,” as used in this context, means that at least about 60%, or about 70%, or about 80%, or about 90%, or about 95%, or at least about 99% of the XTEN amino acid residues of the XTEN sequence do not contribute to secondary structure, as measured or determined by the methods described herein.

[0235] A variety of methods have been established in the art to discern the presence or absence of secondary and tertiary structures in a given polypeptide. In particular, secondary structure can be measured spectrophotometrically, e.g., by circular dichroism spectroscopy in the “far-UV” spectral region (190-250 nm). Secondary structure elements, such as alpha-helix and beta-sheet, each give rise to a characteristic shape and magnitude of CD spectra. Secondary structure can also be predicted for a polypeptide sequence via certain computer programs or algorithms, such as the well-known Chou-Fasman algorithm (Chou, P. Y., et al. (1974) Biochemistry, 13: 222-45) and the Garnier-Osguthorpe-Robson (“GOR”) algorithm (Garnier J, Gibrat J F, Robson B. (1996), GOR method for predicting protein secondary structure from amino acid sequence. Methods Enzymol 266:540-553), as described in US Patent Application Publication No. 20030228309A1. For a given sequence, the algorithms can predict whether there exists some or no secondary structure at all, expressed as the total and/or percentage of residues of the sequence that form, for example, alpha-helices or beta-sheets or the percentage of residues of the sequence predicted to result in random coil formation (which lacks secondary structure).

[0236] In one embodiment, the XTEN sequences used in the subject fusion protein compositions have an alpha-helix percentage ranging from 0% to less than about 5% as determined by the Chou-Fasman algorithm. In another embodiment, the XTEN sequences of the fusion protein compositions have a beta-sheet percentage ranging from 0% to less than about 5% as determined by the Chou-Fasman algorithm. In some embodiments, the XTEN sequences of the fusion protein compositions have an alpha-helix percentage ranging from 0% to less than about 5% and a beta-sheet percentage ranging from 0% to less than about 5% as determined by the Chou-Fasman algorithm. In some embodiments, the XTEN sequences of the fusion protein compositions have an alpha-helix percentage less than about 2% and a beta-sheet percentage less than about 2%. The XTEN sequences of the fusion protein compositions have a high degree of random coil percentage, as determined by the GOR algorithm. In some embodiments, an XTEN sequence have at least about 80%, at least about 90%, at least about 91%, at least about 92%, at least about 93%, at least about 94%, at least about 95%, at least about 96%, at least about 97%, at least about 98%, and most preferably at least about 99% random coil, as determined by the GOR algorithm. In some embodiments, the XTEN sequences of the fusion protein compositions have an alpha-helix percentage ranging from 0% to less than about 5% and a beta-sheet percentage ranging from 0% to less than about 5% as determined by the Chou-Fasman algorithm and at least about 90% random coil, as determined by the GOR algorithm. In other embodiments, the XTEN sequences of the fusion protein compositions have an alpha-helix percentage less than about 2% and a beta-sheet percentage less than about 2% at least about 90% random coil, as determined by the GOR algorithm.

### 1. Non-Repetitive Sequences

[0237] It is contemplated that the XTEN sequences of the CFXTEN embodiments are substantially non-repetitive. In general, repetitive amino acid sequences have a tendency to aggregate or form higher order structures, as exemplified by natural repetitive sequences such as collagens and leucine zippers. These repetitive amino acids may also tend to form contacts resulting in crystalline or pseudocrystalline structures. In contrast, the low tendency of non-repetitive sequences to aggregate enables the design of long-sequence XTENs with a relatively low frequency of charged amino acids that would otherwise be likely to aggregate if the sequences were repetitive. The non-repetitiveness of a subject XTEN can be observed by assessing one or more of the following features. In one embodiment, a “substantially non-repetitive” XTEN sequence has about 36, or at least 72, or at least 96, or at least 144, or at least 288, or at least 400, or at least 500, or at least 600, or at least 700, or at least 800, or at least 864, or at least 900, or at least 1000, or at least 2000, to about 3000 or more amino acid residues, or has a length ranging from about 36 to about 3000, about 100 to about 500, about 500 to about 1000, about 1000 to about 3000 amino acids and residues, in which no three contiguous amino acids in the sequence are identical amino acid types unless the amino acid is serine, in which case no more than three contiguous amino acids are serine residues. In another embodiment, as described more fully below, a “substantially non-repetitive” XTEN sequence comprises motifs of 9 to 14 amino acid residues wherein the motifs consist of 4 to 6 types of amino acids selected from glycine (G), alanine (A), serine (S), threonine (T), glutamate (E) and proline (P), and wherein the sequence of any two contiguous amino acid residues in any one motif is not repeated more than twice in the sequence motif.

[0238] The degree of repetitiveness of a polypeptide or a gene can be measured by computer programs or algorithms or by other means known in the art. According to the current invention, algorithms to be used in calculating the degree of repetitiveness of a particular polypeptide, such as an XTEN, are disclosed herein, and examples of sequences analyzed by algorithms are provided (see Examples, below). In one aspect, the repetitiveness of a polypeptide of a predetermined length can be calculated (hereinafter “subsequence score”) according to the formula given by Equation 1:

$$Subsequence score \frac{{\sum }_{i = 1}^{m} {Count}_{i}}{m} \qquad I$$

[0239] wherein: m=(amino acid length of polypeptide)−(amino acid length of subsequence)+1;
[0240] and Countᵢ=cumulative number of occurrences of each unique subsequence within sequenceᵢ

[0241] An algorithm termed “SegScore” was developed to apply the foregoing equation to quantitate repetitiveness of polypeptides, such as an XTEN, providing the subsequence score wherein sequences of a predetermined amino acid length “n” are analyzed for repetitiveness by determining the number of times (a “count”) a unique subsequence of length “s” appears in the set length, divided by the absolute number of subsequences within the predetermined length of the sequence. FIG. 3 depicts a logic flowchart of the SegScore algorithm, while FIG. 4 portrays a schematic of how a subsequence score is derived for a fictitious XTEN with 11 amino acids and a subsequence length of 3 amino acid residues. For example, a predetermined polypeptide length of 200 amino acid residues has 192 overlapping 9-amino acid subsequences and 198 3-mer subsequences, but the subsequence score of any given polypeptide will depend on the absolute number of unique subsequences and how frequently each unique subsequence (meaning a different amino acid sequence) appears in the predetermined length of the sequence.

[0242] In the context of the present invention, “subsequence score” means the sum of occurrences of each unique 3-mer frame across a 200 consecutive amino acid sequence of the polypeptide divided by the absolute number of unique 3-mer subsequences within the 200 amino acid sequence. Examples of such subsequence scores derived from the first 200 amino acids of repetitive and non-repetitive polypeptides are presented in Example 32. In one embodiment, the invention provides a CFXTEN comprising one XTEN in which the XTEN has a subsequence score less than 12, more preferably less than 10, more preferably less than 9, more preferably less than 8, more preferably less than 7, more preferably less than 6, and most preferably less than 5. In another embodiment, the invention provides CFXTEN comprising at least two to about six XTEN in which at least one XTEN has a subsequence score of less than 10, more preferably less than 9, more preferably less than 8, more preferably less than 7, more preferably less than 6, and most preferably less than 5. In the embodiments of the CFXTEN fusion protein compositions described herein, an XTEN component of a fusion protein with a subsequence score of 10 or less (i.e., 9, 8, 7, etc.) is also substantially non-repetitive.

[0243] It is believed that the non-repetitive characteristic of XTEN of the present invention together with the particular types of amino acids that predominate in the XTEN, rather than the absolute primary sequence, confers many of the enhanced physicochemical and biological properties of the CFXTEN fusion proteins. These enhanced properties include a higher degree of expression of the fusion protein in the host cell, greater genetic stability of the gene encoding XTEN, a greater degree of solubility, less tendency to aggregate, and enhanced pharmacokinetics of the resulting CFXTEN compared to fusion proteins comprising polypeptides having repetitive sequences. These enhanced properties permit more efficient manufacturing, lower cost of goods, and facilitate the formulation of XTEN-comprising pharmaceutical preparations containing extremely high protein concentrations, in some cases exceeding 100 mg/ml. Furthermore, the XTEN polypeptide sequences of the embodiments are designed to have a low degree of internal repetitiveness in order to reduce or substantially eliminate immunogenicity when administered to a mammal. Polypeptide sequences composed of short, repeated motifs largely limited to only three amino acids, such as glycine, serine and glutamate, may result in relatively high antibody titers when administered to a mammal despite the absence of predicted T-cell epitopes in these sequences. This may be caused by the repetitive nature of polypeptides, as it has been shown that immunogens with repeated epitopes, including protein aggregates, cross-linked immunogens, and repetitive carbohydrates are highly immunogenic and can, for example, result in the cross-linking of B-cell receptors causing B-cell activation. (Johansson, J., et al. (2007) Vaccine, 25:1676-82; Yankai, Z., et al. (2006) Biochem Biophys Res Commun, 345:1365-71; Hsu, C. T., et al. (2000) Cancer Res, 60:3701-5); Bachmann M F, et al. Eur J Immunol (1995) 25(12):3445-3451).

### 2. Exemplary Sequence Motifs

[0244] The present invention encompasses XTEN used as fusion partners that comprise multiple units of shorter sequences, or motifs, in which the amino acid sequences of the motifs are non-repetitive. The non-repetitive property is met despite the use of a “building block” approach using a library of sequence motifs that are multimerized to create the XTEN sequences. Thus, while an XTEN sequence may consist of multiple units of as few as four different types of sequence motifs, because the motifs themselves generally consist of non-repetitive amino acid sequences, the overall XTEN sequence is designed to render the sequence substantially non-repetitive.

[0245] In one embodiment, an XTEN has a substantially non-repetitive sequence of greater than about 36 to about 1000, or about 100 to about 2000, or about 400 to about 3000 amino acid residues, or even longer wherein at least about 80%, or at least about 85%, or at least about 90%, or at least about 95%, or at least about 97%, or about 100% of the XTEN sequence consists of non-overlapping sequence motifs, and wherein each of the motifs has about 9 to 36 amino acid residues. In other embodiments, at least about 80%, or at least about 85%, or at least about 90%, or at least about 95%, or at least about 97%, or about 100% of the XTEN sequence consists of non-overlapping sequence motifs wherein each of the motifs has 9 to 14 amino acid residues. In still other embodiments, at least about 80%, or at least about 85%, or at least about 90%, or at least about 95%, or at least about 97%, or about 100% of the XTEN sequence consists of non-overlapping sequence motifs wherein each of the motifs has 12 amino acid residues. In these embodiments, it is preferred that the sequence motifs are composed of substantially (e.g., 90% or more) or exclusively small hydrophilic amino acids, such that the overall sequence has an unstructured, flexible characteristic. Examples of amino acids that are included in XTEN are, e.g., arginine, lysine, threonine, alanine, asparagine, glutamine, aspartate, glutamate, serine, and glycine. As a result of testing variables such as codon optimization, assembly polynucleotides encoding sequence motifs, expression of protein, charge distribution and solubility of expressed protein, and secondary and tertiary structure, it was discovered that XTEN compositions with the enhanced characteristics disclosed herein mainly include glycine (G), alanine (A), serine (S), threonine (T), glutamate (E) and proline (P) residues wherein the sequences are designed to be substantially non-repetitive. In one embodiment, XTEN sequences have predominately four to six types of amino acids selected from glycine (G), alanine (A), serine (S), threonine (T), glutamate (E) or proline (P) that are arranged in a substantially non-repetitive sequence that is greater than about 36 to about 1000, or about 100 to about 2000, or about 400 to about 3000 amino acid residues in length. In some embodiment, an XTEN sequence is made of 4, 5, or 6 types of amino acids selected from the group consisting of glycine (G), alanine (A), serine (S), threonine (T), glutamate (E) or proline (P). In some embodiments, XTEN have sequences of greater than about 36 to about 1000, or about 100 to about 2000, or about 400 to about 3000 amino acid residues wherein at least about 80% of the sequence consists of non-overlapping sequence motifs wherein each of the motifs has 9 to 36 amino acid residues and wherein at least 90%, or at least 91%, or at least 92%, or at least 93%, or at least 94%, or at least 95%, or at least 96%, or at least 97%, or 100% of each of the motifs consists of 4 to 6 types of amino acids selected from glycine (G), alanine (A), serine (S), threonine (T), glutamate (E) and proline (P), and wherein the content of any one amino acid type in the full-length XTEN does not exceed 30%. In other embodiments, at least about 90% of the XTEN sequence consists of non-overlapping sequence motifs wherein each of the motifs has 9 to 36 amino acid residues wherein the motifs consist of 4 to 6 types of amino acids selected from glycine (G), alanine (A), serine (S), threonine (T), glutamate (E) and proline (P), and wherein the content of any one amino acid type in the full-length XTEN does not exceed 40%, or about 30%, or about 25%. In other embodiments, at least about 90% of the XTEN sequence consists of non-overlapping sequence motifs wherein each of the motifs has 12 amino acid residues consisting of 4 to 6 types of amino acids selected from glycine (G), alanine (A), serine (S), threonine (T), glutamate (E) and proline (P), and wherein the content of any one amino acid type in the full-length XTEN does not exceed 40%, or 30%, or about 25%. In yet other embodiments, at least about 90%, or about 91%, or about 92%, or about 93%, or about 94%, or about 95%, or about 96%, or about 97%, or about 98%, or about 99%, to about 100% of the XTEN sequence consists of non-overlapping sequence motifs wherein each of the motifs has 12 amino acid residues consisting of glycine (G), alanine (A), serine (S), threonine (T), glutamate (E) and proline (P).

[0246] In still other embodiments, XTENs comprise substantially non-repetitive sequences of greater than about 36 to about 3000 amino acid residues wherein at least about 80%, or at least about 90%, or about 91%, or about 92%, or about 93%, or about 94%, or about 95%, or about 96%, or about 97%, or about 98%, or about 99% of the sequence consists of non-overlapping sequence motifs of 9 to 14 amino acid residues wherein the motifs consist of 4 to 6 types of amino acids selected from glycine (G), alanine (A), serine (S), threonine (T), glutamate (E) and proline (P), and wherein the sequence of any two contiguous amino acid residues in any one motif is not repeated more than twice in the sequence motif In other embodiments, at least about 90%, or about 91%, or about 92%, or about 93%, or about 94%, or about 95%, or about 96%, or about 97%, or about 98%, or about 99% of an XTEN sequence consists of non-overlapping sequence motifs of 12 amino acid residues wherein the motifs consist of four to six types of amino acids selected from glycine (G), alanine (A), serine (S), threonine (T), glutamate (E) and proline (P), and wherein the sequence of any two contiguous amino acid residues in any one sequence motif is not repeated more than twice in the sequence motif In other embodiments, at least about 90%, or about 91%, or about 92%, or about 93%, or about 94%, or about 95%, or about 96%, or about 97%, or about 98%, or about 99% of an XTEN sequence consists of non-overlapping sequence motifs of 12 amino acid residues wherein the motifs consist of glycine (G), alanine (A), serine (S), threonine (T), glutamate (E) and proline (P), and wherein the sequence of any two contiguous amino acid residues in any one sequence motif is not repeated more than twice in the sequence motif In yet other embodiments, XTENs consist of 12 amino acid sequence motifs wherein the amino acids are selected from glycine (G), alanine (A), serine (S), threonine (T), glutamate (E) and proline (P), and wherein the sequence of any two contiguous amino acid residues in any one sequence motif is not repeated more than twice in the sequence motif, and wherein the content of any one amino acid type in the full-length XTEN does not exceed 30%. The foregoing embodiments are examples of substantially non-repetitive XTEN sequences. Additional examples are detailed below.

[0247] In some embodiments, the invention provides CFXTEN compositions comprising one, or two, or three, or four, five, six or more non-repetitive XTEN sequence(s) of about 36 to about 1000 amino acid residues, or cumulatively about 100 to about 3000 amino acid residues wherein at least about 80%, or at least about 90%, or about 91%, or about 92%, or about 93%, or about 94%, or about 95%, or about 96%, or about 97%, or about 98%, or about 99% to about 100% of the sequence consists of multiple units of four or more non-overlapping sequence motifs selected from the amino acid sequences of Table 3, wherein the overall sequence remains substantially non-repetitive. In some embodiments, the XTEN comprises non-overlapping sequence motifs in which about 80%, or at least about 85%, or at least about 90%, or about 91%, or about 92%, or about 93%, or about 94%, or about 95%, or about 96%, or about 97%, or about 98%, or about 99% or about 100% of the sequence consists of multiple units of non-overlapping sequences selected from a single motif family selected from Table 3, resulting in a family sequence. As used herein, “family” means that the XTEN has motifs selected only from a single motif category from Table 3; i.e., AD, AE, AF, AG, AM, AQ, BC, or BD XTEN, and that any other amino acids in the XTEN not from a family motif are selected to achieve a needed property, such as to permit incorporation of a restriction site by the encoding nucleotides, incorporation of a cleavage sequence, or to achieve a better linkage to a FVIII coagulation factor component of the CFXTEN. In some embodiments of XTEN families, an XTEN sequence comprises multiple units of non-overlapping sequence motifs of the AD motif family, or of the AE motif family, or of the AF motif family, or of the AG motif family, or of the AM motif family, or of the AQ motif family, or of the BC family, or of the BD family, with the resulting XTEN exhibiting the range of homology described above. In other embodiments, the XTEN comprises multiple units of motif sequences from two or more of the motif families of Table 3. These sequences can be selected to achieve desired physical/chemical characteristics, including such properties as net charge, lack of secondary structure, or lack of repetitiveness that are conferred by the amino acid composition of the motifs, described more fully below. In the embodiments hereinabove described in this paragraph, the motifs incorporated into the XTEN can be selected and assembled using the methods described herein to achieve an XTEN of about 36 to about 3000 amino acid residues.

TABLE 3
XTEN Sequence Motifs of 12 Amino Acids and
Motif Families

| Motif Family* | MOTIF SEQUENCE |
|---|---|
| AD | GESPGGSSGSES |
| AD | GSEGSSGPGESS |
| AD | GSSESGSSEGGP |
| AD | GSGGEPSESGSS |
| AE, AM | GSPAGSPTSTEE |
| AE, AM, AQ | GSEPATSGSETP |
| AE, AM, AQ | GTSESATPESGP |
| AE, AM, AQ | GTSTEPSEGSAP |
| AF, AM | GSTSESPSGTAP |
| AF, AM | GTSTPESGSASP |
| AF, AM | GTSPSGESSTAP |
| AF, AM | GSTSSTAESPGP |
| AG, AM | GTPGSGTASSSP |
| AG, AM | GSSTPSGATGSP |
| AG, AM | GSSPSASTGTGP |
| AG, AM | GASPGTSSTGSP |
| AQ | GEPAGSPTSTSE |
| AQ | GTGEPSSTPASE |
| AQ | GSGPSTESAPTE |
| AQ | GSETPSGPSETA |
| AQ | GPSETSTSEPGA |
| AQ | GSPSEPTEGTSA |
| BC | GSGASEPTSTEP |
| BC | GSEPATSGTEPS |
| BC | GTSEPSTSEPGA |
| BC | GTSTEPSEPGSA |
| BD | GSTAGSETSTEA |
| BD | GSETATSGSETA |
| BD | GTSESATSESGA |
| BD | GTSTEASEGSAS |

*Denotes individual motif sequences that, when used together in various permutations, results in a “family sequence”

[0248] In some embodiments of XTEN families, an XTEN sequence comprises multiple units of non-overlapping sequence motifs of the AD motif family, the AE motif family, or the AF motif family, or the AG motif family, or the AM motif family, or the AQ motif family, or the BC family, or the BD family, with the resulting XTEN exhibiting the range of homology described above. In other embodiments, the XTEN comprises multiple units of motif sequences from two or more of the motif families of Table 3, selected to achieve desired physicochemical characteristics, including such properties as net charge, lack of secondary structure, or lack of repetitiveness that may be conferred by the amino acid composition of the motifs, described more fully below. In the embodiments hereinabove described in this paragraph, the motifs incorporated into the XTEN can be selected and assembled using the methods described herein to achieve an XTEN of about 36 to about 3000 amino acid residues. Non-limiting examples of XTEN family sequences are presented in Table 4.

TABLE 4
XTEN Polypeptides

| XTEN | |
|---|---|
| Name | Amino Acid Sequence |
| AE42_1 | TEPSEGSAPGSPAGSPTSTEEGTSESATPESGPGSEPATSGS |
| AE42_2 | PAGSPTSTEEGTSTEPSEGSAPGTSESATPESGPGSEPATSG |
| AE42_3 | SEPATSGSETPGTSESATPESGPGTSTEPSEGSAPGSPAGSP |
| AE42_4 | GAPGSPAGSPTSTEEGTSESATPESGPGSEPATSGSETPASS |
| AG42_1 | GAPSPSASTGTGPGTPGSGTASSSPGSSTPSGATGSPGPSGP |
| AG42_2 | GPGTPGSGTASSSPGSSTPSGATGSPGSSPSASTGTGPGASP |
| AG42_3 | SPSASTGTGPGASPGTSSTGSPGTPGSGTASSSPGSSTPSGA |
| AG42_4 | SASTGTGPGASPGTSSTGSPGTPGSGTASSSPGSSTPSGATG |
| AE48 | MAEPAGSPTSTEEGTPGSGTASSSPGSSTPSGATGSPGASPGTSSTGS |
| AM48 | MAEPAGSPTSTEEGASPGTSSTGSPGSSTPSGATGSPGSSTPSGATGS |
| AE144 | GSEPATSGSETPGTSESATPESGPGSEPATSGSETPGSPAGSPTSTEEGTSTEPSEGSAPGSEPATSG |
| | SETPGSEPATSGSETPGSEPATSGSETPGTSTEPSEGSAPGTSESATPESGPGSEPATSGSETPGTST |
| | EPSEGSAP |
| AF144 | GTSTPESGSASPGTSPSGESSTAPGTSPSGESSTAPGSTSSTAESPGPGSTSESPSGTAPGSTSSTAE |
| | SPGPGTSPSGESSTAPGTSTPESGSASPGSTSSTAESPGPGTSPSGESSTAPGTSPSGESSTAPGTSP |
| | SGESSTAP |
| AG144_1 | PGSSPSASTGTGPGSSPSASTGTGPGTPGSGTASSSPGSSTPSGATGSPGSSPSASTGTGPGASPGT |
| | SSTGSPGTPGSGTASSSPGSSTPSGATGSPGTPGSGTASSSPGASPGTSSTGSPGASPGTSSTGSPG |
| | TPGSGTASSS |
| AG144_2 | SGTASSSPGSSTPSGATGSPGTPGSGTASSSPGSSTPSGATGSPGSSTPSGATGSPGSSPSASTGTG |
| | PGSSPSASTGTGPGASPGTSSTGSPGTPGSGTASSSPGSSTPSGATGSPGSSPSASTGTGPGSSPSAS |
| | TGTGPGASP |
| AG144_3 | GTPGSGTASSSPGSSTPSGATGSPGSSTPSGATGSPGSSPSASTGTGPGSSPSASTGTGPGASPGTS |
| | STGSPGTPGSGTASSSPGSSTPSGATGSPGSSPSASTGTGPGSSPSASTGTGPGASPGTSSTGSPGA |
| | SPGTSSTGSP |
| AG144_4 | GTPGSGTASSSPGSSTPSGATGSPGSSPSASTGTGPGSSPSASTGTGPGASPGTSSTGSPGASPGTS |
| | STGSPGSSTPSGATGSPGSSPSASTGTGPGASPGTSSTGSPGSSPSASTGTGPGTPGSGTASSSPGS |
| | STPSGATGSP |
| AE288 | GTSESATPESGPGSEPATSGSETPGTSESATPESGPGSEPATSGSETPGTSESATPESGPGTSTEPSE |
| | GSAPGSPAGSPTSTEEGTSESATPESGPGSEPATSGSETPGTSESATPESGPGSPAGSPTSTEEGSP |
| | AGSPTSTEEGTSTEPSEGSAPGTSESATPESGPGTSESATPESGPGTSESATPESGPGSEPATSGSET |
| | PGSEPATSGSETPGSPAGSPTSTEEGTSTEPSEGSAPGTSTEPSEGSAPGSEPATSGSETPGTSESAT |
| | PESGPGTSTEPSEGSAP |
| AG288_1 | ASSSPGASPGTSSTGSPGASPGTSSTGSPGASPGTSSTGSPGASPGTSSTGSPGTPGSGTASSSPGSS |
| | TPSGATGSPGTPGSGTASSSPGSSTPSGATGSPGTPGSGTASSSPGSSTPSGATGSPGSSTPSGATG |
| | SPGSSPSASTGTGPGSSPSASTGTGPGASPGTSSTGSPGTPGSGTASSSPGSSTPSGATGSPGSSPSA |
| | STGTGPGSSPSASTGTGPGASPGTSSTGSPGASPGTSSTGSPGSSTPSGATGSPGSSPSASTGTGPG |
| | ASPGTSSTGSPGSSPSASTGTGPGTPGSGTASSSPGSSTPSGATGS |
| AG288_2 | PGASPGTSSTGSPGASPGTSSTGSPGTPGSGTASSSPGSSTPSGATGSPGTPGSGTASSSPGSSTPS |
| | GATGSPGTPGSGTASSSPGSSTPSGATGSPGSSTPSGATGSPGSSPSASTGTGPGSSPSASTGTGPG |
| | ASPGTSSTGSPGTPGSGTASSSPGSSTPSGATGSPGSSPSASTGTGPGSSPSASTGTGPGASPGTSS |
| | TGSPGASPGTSSTGSPGSSTPSGATGSPGSSPSASTGTGPGASPGTSSTGSPGSSPSASTGTGPGTP |
| | GSGTASSSPGSSTPSGATGS |
| AG288_3 | GSSPSASTGTGPGSSPSASTGTGPGTPGSGTASSSPGSSTPSGATGSPGSSPSASTGTGPGASPGTS |
| | STGSPGTPGSGTASSSPGSSTPSGATGSPGTPGSGTASSSPGASPGTSSTGSPGASPGTSSTGSPGT |
| | PGSGTASSSPGSSTPSGATGSPGASPGTSSTGSPGTPGSGTASSSPGSSTPSGATGSPGSSPSASTG |
| | TGPGSSPSASTGTGPGSSTPSGATGSPGSSTPSGATGSPGASPGTSSTGSPGASPGTSSTGSPGASP |
| | GTSSTGSPGTPGSGTASSSP |
| AF504 | GASPGTSSTGSPGSSPSASTGTGPGSSPSASTGTGPGTPGSGTASSSPGSSTPSGATGSPGSXPSAS |
| | TGTGPGASPGTSSTGSPGTPGSGTASSSPGSSTPSGATGSPGTPGSGTASSSPGASPGTSSTGSPGA |
| | SPGTSSTGSPGTPGSGTASSSPGSSTPSGATGSPGASPGTSSTGSPGTPGSGTASSSPGSSTPSGAT |
| | GSPGSXPSASTGTGPGSSPSASTGTGPGSSTPSGATGSPGSSTPSGATGSPGASPGTSSTGSPGASP |
| | GTSSTGSPGASPGTSSTGSPGTPGSGTASSSPGASPGTSSTGSPGASPGTSSTGSPGASPGTSSTGS |
| | PGSSPSASTGTGPGTPGSGTASSSPGASPGTSSTGSPGASPGTSSTGSPGASPGTSSTGSPGSSTPS |
| | GATGSPGSSTPSGATGSPGASPGTSSTGSPGTPGSGTASSSPGSSTPSGATGSPGSSTPSGATGSPG |
| | SSTPSGATGSPGSSPSASTGTGPGASPGTSSTGSP |
| AF540 | GSTSSTAESPGPGSTSSTAESPGPGSTSESPSGTAPGSTSSTAESPGPGSTSSTAESPGPGTSTPESG |
| | SASPGSTSESPSGTAPGTSPSGESSTAPGSTSESPSGTAPGSTSESPSGTAPGTSPSGESSTAPGSTS |
| | ESPSGTAPGSTSESPSGTAPGTSPSGESSTAPGSTSESPSGTAPGSTSESPSGTAPGSTSESPSGTAP |
| | GTSTPESGSASPGSTSESPSGTAPGTSTPESGSASPGSTSSTAESPGPGSTSSTAESPGPGTSTPESG |
| | SASPGTSTPESGSASPGSTSESPSGTAPGTSTPESGSASPGTSTPESGSASPGSTSESPSGTAPGSTS |
| | ESPSGTAPGSTSESPSGTAPGSTSSTAESPGPGTSTPESGSASPGTSTPESGSASPGSTSESPSGTAP |
| | GSTSESPSGTAPGTSTPESGSASPGSTSESPSGTAPGSTSESPSGTAPGTSTPESGSASPGTSPSGES |
| | STAPGSTSSTAESPGPGTSPSGESSTAPGSTSSTAESPGPGTSTPESGSASPGSTSESPSGTAP |
| AD576 | GSSESGSSEGGPGSGGEPSESGSSGSSESGSSEGGPGSSESGSSEGGPGSSESGSSEGGPGSSESGS |
| | SEGGPGSSESGSSEGGPGESPGGSSGSESGSEGSSGPGESSGSSESGSSEGGPGSSESGSSEGGPGS |
| | SESGSSEGGPGSGGEPSESGSSGESPGGSSGSESGESPGGSSGSESGSGGEPSESGSSGSSESGSSE |
| | GGPGSGGEPSESGSSGSGGEPSESGSSGSEGSSGPGESSGESPGGSSGSESGSGGEPSESGSSGSGG |
| | EPSESGSSGSGGEPSESGSSGSSESGSSEGGPGESPGGSSGSESGESPGGSSGSESGESPGGSSGSES |
| | GESPGGSSGSESGESPGGSSGSESGSSESGSSEGGPGSGGEPSESGSSGSEGSSGPGESSGSSESGS |
| | SEGGPGSGGEPSESGSSGSSESGSSEGGPGSGGEPSESGSSGESPGGSSGSESGESPGGSSGSESGS |
| | SESGSSEGGPGSGGEPSESGSSGSSESGSSEGGPGSGGEPSESGSSGSGGEPSESGSSGESPGGSSG |
| | SESGSEGSSGPGESSGSSESGSSEGGPGSEGSSGPGESS |
| AE576 | GSPAGSPTSTEEGTSESATPESGPGTSTEPSEGSAPGSPAGSPTSTEEGTSTEPSEGSAPGTSTEPSE |
| | GSAPGTSESATPESGPGSEPATSGSETPGSEPATSGSETPGSPAGSPTSTEEGTSESATPESGPGTST |
| | EPSEGSAPGTSTEPSEGSAPGSPAGSPTSTEEGTSTEPSEGSAPGTSTEPSEGSAPGTSESATPESGP |
| | GTSTEPSEGSAPGTSESATPESGPGSEPATSGSETPGTSTEPSEGSAPGTSTEPSEGSAPGTSESATP |
| | ESGPGTSESATPESGPGSPAGSPTSTEEGTSESATPESGPGSEPATSGSETPGTSESATPESGPGTST |
| | EPSEGSAPGTSTEPSEGSAPGTSTEPSEGSAPGTSTEPSEGSAPGTSTEPSEGSAPGTSTEPSEGSAP |
| | GSPAGSPTSTEEGTSTEPSEGSAPGTSESATPESGPGSEPATSGSETPGTSESATPESGPGSEPATSG |
| | SETPGTSESATPESGPGTSTEPSEGSAPGTSESATPESGPGSPAGSPTSTEEGSPAGSPTSTEEGSPA |
| | GSPTSTEEGTSESATPESGPGTSTEPSEGSAP |
| AF576 | GSTSSTAESPGPGSTSSTAESPGPGSTSESPSGTAPGSTSSTAESPGPGSTSSTAESPGPGTSTPESG |
| | SASPGSTSESPSGTAPGTSPSGESSTAPGSTSESPSGTAPGSTSESPSGTAPGTSPSGESSTAPGSTS |
| | ESPSGTAPGSTSESPSGTAPGTSPSGESSTAPGSTSESPSGTAPGSTSESPSGTAPGSTSESPSGTAP |
| | GTSTPESGSASPGSTSESPSGTAPGTSTPESGSASPGSTSSTAESPGPGSTSSTAESPGPGTSTPESG |
| | SASPGTSTPESGSASPGSTSESPSGTAPGTSTPESGSASPGTSTPESGSASPGSTSESPSGTAPGSTS |
| | ESPSGTAPGSTSESPSGTAPGSTSSTAESPGPGTSTPESGSASPGTSTPESGSASPGSTSESPSGTAP |
| | GSTSESPSGTAPGTSTPESGSASPGSTSESPSGTAPGSTSESPSGTAPGTSTPESGSASPGTSPSGES |
| | STAPGSTSSTAESPGPGTSPSGESSTAPGSTSSTAESPGPGTSTPESGSASPGSTSESPSGTAPGSTS |
| | STAESPGPGTSTPESGSASPGTSTPESGSASP |
| AG576 | PGTPGSGTASSSPGSSTPSGATGSPGSSPSASTGTGPGSSPSASTGTGPGSSTPSGATGSPGSSTPS |
| | GATGSPGASPGTSSTGSPGASPGTSSTGSPGASPGTSSTGSPGTPGSGTASSSPGASPGTSSTGSPG |
| | ASPGTSSTGSPGASPGTSSTGSPGSSPSASTGTGPGTPGSGTASSSPGASPGTSSTGSPGASPGTSS |
| | TGSPGASPGTSSTGSPGSSTPSGATGSPGSSTPSGATGSPGASPGTSSTGSPGTPGSGTASSSPGSS |
| | TPSGATGSPGSSTPSGATGSPGSSTPSGATGSPGSSPSASTGTGPGASPGTSSTGSPGASPGTSSTG |
| | SPGTPGSGTASSSPGASPGTSSTGSPGASPGTSSTGSPGASPGTSSTGSPGASPGTSSTGSPGTPGS |
| | GTASSSPGSSTPSGATGSPGTPGSGTASSSPGSSTPSGATGSPGTPGSGTASSSPGSSTPSGATGSP |
| | GSSTPSGATGSPGSSPSASTGTGPGSSPSASTGTGPGASPGTSSTGSPGTPGSGTASSSPGSSTPSG |
| | ATGSPGSSPSASTGTGPGSSPSASTGTGPGASPGTSSTGS |
| AE624 | MAEPAGSPTSTEEGTPGSGTASSSPGSSTPSGATGSPGASPGTSSTGSPGSPAGSPTSTEEGTSESA |
| | TPESGPGTSTEPSEGSAPGSPAGSPTSTEEGTSTEPSEGSAPGTSTEPSEGSAPGTSESATPESGPGS |
| | EPATSGSETPGSEPATSGSETPGSPAGSPTSTEEGTSESATPESGPGTSTEPSEGSAPGTSTEPSEGS |
| | APGSPAGSPTSTEEGTSTEPSEGSAPGTSTEPSEGSAPGTSESATPESGPGTSTEPSEGSAPGTSESA |
| | TPESGPGSEPATSGSETPGTSTEPSEGSAPGTSTEPSEGSAPGTSESATPESGPGTSESATPESGPGS |
| | PAGSPTSTEEGTSESATPESGPGSEPATSGSETPGTSESATPESGPGTSTEPSEGSAPGTSTEPSEGS |
| | APGTSTEPSEGSAPGTSTEPSEGSAPGTSTEPSEGSAPGTSTEPSEGSAPGSPAGSPTSTEEGTSTEP |
| | SEGSAPGTSESATPESGPGSEPATSGSETPGTSESATPESGPGSEPATSGSETPGTSESATPESGPGT |
| | STEPSEGSAPGTSESATPESGPGSPAGSPTSTEEGSPAGSPTSTEEGSPAGSPTSTEEGTSESATPES |
| | GPGTSTEPSEGSAP |
| AD836 | GSSESGSSEGGPGSSESGSSEGGPGESPGGSSGSESGSGGEPSESGSSGESPGGSSGSESGESPGGS |
| | SGSESGSSESGSSEGGPGSSESGSSEGGPGSSESGSSEGGPGESPGGSSGSESGESPGGSSGSESGE |
| | SPGGSSGSESGSSESGSSEGGPGSSESGSSEGGPGSSESGSSEGGPGSSESGSSEGGPGSSESGSSE |
| | GGPGSSESGSSEGGPGSGGEPSESGSSGESPGGSSGSESGESPGGSSGSESGSGGEPSESGSSGSEG |
| | SSGPGESSGSSESGSSEGGPGSGGEPSESGSSGSEGSSGPGESSGSSESGSSEGGPGSGGEPSESGS |
| | SGESPGGSSGSESGSGGEPSESGSSGSGGEPSESGSSGSSESGSSEGGPGSGGEPSESGSSGSGGEP |
| | SESGSSGSEGSSGPGESSGESPGGSSGSESGSEGSSGPGESSGSEGSSGPGESSGSGGEPSESGSSG |
| | SSESGSSEGGPGSSESGSSEGGPGESPGGSSGSESGSGGEPSESGSSGSEGSSGPGESSGESPGGSS |
| | GSESGSEGSSGPGSSESGSSEGGPGSGGEPSESGSSGSEGSSGPGESSGSEGSSGPGESSGSEGSSG |
| | PGESSGSGGEPSESGSSGSGGEPSESGSSGESPGGSSGSESGESPGGSSGSESGSGGEPSESGSSGS |
| | EGSSGPGESSGESPGGSSGSESGSSESGSSEGGPGSSESGSSEGGPGSSESGSSEGGPGSGGEPSES |
| | GSSGSSESGSSEGGPGESPGGSSGSESGSGGEPSESGSSGSSESGSSEGGPGESPGGSSGSESGSGG |
| | EPSESGSSGESPGGSSGSESGSGGEPSESGSS |
| AE864 | GSPAGSPTSTEEGTSESATPESGPGTSTEPSEGSAPGSPAGSPTSTEEGTSTEPSEGSAPGTSTEPSE |
| | GSAPGTSESATPESGPGSEPATSGSETPGSEPATSGSETPGSPAGSPTSTEEGTSESATPESGPGTST |
| | EPSEGSAPGTSTEPSEGSAPGSPAGSPTSTEEGTSTEPSEGSAPGTSTEPSEGSAPGTSESATPESGP |
| | GTSTEPSEGSAPGTSESATPESGPGSEPATSGSETPGTSTEPSEGSAPGTSTEPSEGSAPGTSESATP |
| | ESGPGTSESATPESGPGSPAGSPTSTEEGTSESATPESGPGSEPATSGSETPGTSESATPESGPGTST |
| | EPSEGSAPGTSTEPSEGSAPGTSTEPSEGSAPGTSTEPSEGSAPGTSTEPSEGSAPGTSTEPSEGSAP |
| | GSPAGSPTSTEEGTSTEPSEGSAPGTSESATPESGPGSEPATSGSETPGTSESATPESGPGSEPATSG |
| | SETPGTSESATPESGPGTSTEPSEGSAPGTSESATPESGPGSPAGSPTSTEEGSPAGSPTSTEEGSPA |
| | GSPTSTEEGTSESATPESGPGTSTEPSEGSAPGTSESATPESGPGSEPATSGSETPGTSESATPESGP |
| | GSEPATSGSETPGTSESATPESGPGTSTEPSEGSAPGSPAGSPTSTEEGTSESATPESGPGSEPATSG |
| | SETPGTSESATPESGPGSPAGSPTSTEEGSPAGSPTSTEEGTSTEPSEGSAPGTSESATPESGPGTSE |
| | SATPESGPGTSESATPESGPGSEPATSGSETPGSEPATSGSETPGSPAGSPTSTEEGTSTEPSEGSAP |
| | GTSTEPSEGSAPGSEPATSGSETPGTSESATPESGPGTSTEPSEGSAP |
| AF864 | GSTSESPSGTAPGTSPSGESSTAPGSTSESPSGTAPGSTSESPSGTAPGTSTPESGSASPGTSTPESG |
| | SASPGSTSESPSGTAPGSTSESPSGTAPGTSPSGESSTAPGSTSESPSGTAPGTSPSGESSTAPGTSP |
| | SGESSTAPGSTSSTAESPGPGTSPSGESSTAPGTSPSGESSTAPGSTSSTAESPGPGTSTPESGSASP |
| | GTSTPESGSASPGSTSESPSGTAPGSTSESPSGTAPGTSTPESGSASPGSTSSTAESPGPGTSTPESG |
| | SASPGSTSESPSGTAPGTSPSGESSTAPGSTSSTAESPGPGTSPSGESSTAPGTSTPESGSASPGSTS |
| | STAESPGPGSTSSTAESPGPGSTSSTAESPGPGSTSSTAESPGPGTSPSGESSTAPGSTSESPSGTAP |
| | GSTSESPSGTAPGTSTPESGPXXXGASASGAPSTXXXXSESPSGTAPGSTSESPSGTAPGSTSESPS |
| | GTAPGSTSESPSGTAPGSTSESPSGTAPGSTSESPSGTAPGTSTPESGSASPGTSPSGESSTAPGTSP |
| | SGESSTAPGSTSSTAESPGPGTSPSGESSTAPGTSTPESGSASPGSTSESPSGTAPGSTSESPSGTAP |
| | GTSPSGESSTAPGSTSESPSGTAPGTSTPESGSASPGTSTPESGSASPGSTSESPSGTAPGTSTPESG |
| | SASPGSTSSTAESPGPGSTSESPSGTAPGSTSESPSGTAPGTSPSGESSTAPGSTSSTAESPGPGTSP |
| | SGESSTAPGTSTPESGSASPGTSPSGESSTAPGTSPSGESSTAPGTSPSGESSTAPGSTSSTAESPGP |
| | GSTSSTAESPGPGTSPSGESSTAPGSSPSASTGTGPGSSTPSGATGSPGSSTPSGATGSP |
| AG864 | GASPGTSSTGSPGSSPSASTGTGPGSSPSASTGTGPGTPGSGTASSSPGSSTPSGATGSPGSSPSAS |
| | TGTGPGASPGTSSTGSPGTPGSGTASSSPGSSTPSGATGSPGTPGSGTASSSPGASPGTSSTGSPGA |
| | SPGTSSTGSPGTPGSGTASSSPGSSTPSGATGSPGASPGTSSTGSPGTPGSGTASSSPGSSTPSGAT |
| | GSPGSSPSASTGTGPGSSPSASTGTGPGSSTPSGATGSPGSSTPSGATGSPGASPGTSSTGSPGASP |
| | GTSSTGSPGASPGTSSTGSPGTPGSGTASSSPGASPGTSSTGSPGASPGTSSTGSPGASPGTSSTGS |
| | PGSSPSASTGTGPGTPGSGTASSSPGASPGTSSTGSPGASPGTSSTGSPGASPGTSSTGSPGSSTPS |
| | GATGSPGSSTPSGATGSPGASPGTSSTGSPGTPGSGTASSSPGSSTPSGATGSPGSSTPSGATGSPG |
| | SSTPSGATGSPGSSPSASTGTGPGASPGTSSTGSPGASPGTSSTGSPGTPGSGTASSSPGASPGTSS |
| | TGSPGASPGTSSTGSPGASPGTSSTGSPGASPGTSSTGSPGTPGSGTASSSPGSSTPSGATGSPGTP |
| | GSGTASSSPGSSTPSGATGSPGTPGSGTASSSPGSSTPSGATGSPGSSTPSGATGSPGSSPSASTGT |
| | GPGSSPSASTGTGPGASPGTSSTGSPGTPGSGTASSSPGSSTPSGATGSPGSSPSASTGTGPGSSPS |
| | ASTGTGPGASPGTSSTGSPGASPGTSSTGSPGSSTPSGATGSPGSSPSASTGTGPGASPGTSSTGSP |
| | GSSPSASTGTGPGTPGSGTASSSPGSSTPSGATGSPGSSTPSGATGSPGASPGTSSTGSP |
| AM875 | GTSTEPSEGSAPGSEPATSGSETPGSPAGSPTSTEEGSTSSTAESPGPGTSTPESGSASPGSTSESPS |
| | GTAPGSTSESPSGTAPGTSTPESGSASPGTSTPESGSASPGSEPATSGSETPGTSESATPESGPGSPA |
| | GSPTSTEEGTSTEPSEGSAPGTSESATPESGPGTSTEPSEGSAPGTSTEPSEGSAPGSPAGSPTSTEE |
| | GTSTEPSEGSAPGTSTEPSEGSAPGTSESATPESGPGTSESATPESGPGTSTEPSEGSAPGTSTEPSE |
| | GSAPGTSESATPESGPGTSTEPSEGSAPGSEPATSGSETPGSPAGSPTSTEEGSSTPSGATGSPGTP |
| | GSGTASSSPGSSTPSGATGSPGTSTEPSEGSAPGTSTEPSEGSAPGSEPATSGSETPGSPAGSPTSTE |
| | EGSPAGSPTSTEEGTSTEPSEGSAPGASASGAPSTGGTSESATPESGPGSPAGSPTSTEEGSPAGSP |
| | TSTEEGSTSSTAESPGPGSTSESPSGTAPGTSPSGESSTAPGTPGSGTASSSPGSSTPSGATGSPGSS |
| | PSASTGTGPGSEPATSGSETPGTSESATPESGPGSEPATSGSETPGSTSSTAESPGPGSTSSTAESPG |
| | PGTSPSGESSTAPGSEPATSGSETPGSEPATSGSETPGTSTEPSEGSAPGSTSSTAESPGPGTSTPES |
| | GSASPGSTSESPSGTAPGTSTEPSEGSAPGTSTEPSEGSAPGTSTEPSEGSAPGSSTPSGATGSPGSS |
| | PSASTGTGPGASPGTSSTGSPGSEPATSGSETPGTSESATPESGPGSPAGSPTSTEEGSSTPSGATG |
| | SPGSSPSASTGTGPGASPGTSSTGSPGTSESATPESGPGTSTEPSEGSAPGTSTEPSEGSAP |
| AE912 | MAEPAGSPTSTEEGTPGSGTASSSPGSSTPSGATGSPGASPGTSSTGSPGSPAGSPTSTEEGTSESA |
| | TPESGPGTSTEPSEGSAPGSPAGSPTSTEEGTSTEPSEGSAPGTSTEPSEGSAPGTSESATPESGPGS |
| | EPATSGSETPGSEPATSGSETPGSPAGSPTSTEEGTSESATPESGPGTSTEPSEGSAPGTSTEPSEGS |
| | APGSPAGSPTSTEEGTSTEPSEGSAPGTSTEPSEGSAPGTSESATPESGPGTSTEPSEGSAPGTSESA |
| | TPESGPGSEPATSGSETPGTSTEPSEGSAPGTSTEPSEGSAPGTSESATPESGPGTSESATPESGPGS |
| | PAGSPTSTEEGTSESATPESGPGSEPATSGSETPGTSESATPESGPGTSTEPSEGSAPGTSTEPSEGS |
| | APGTSTEPSEGSAPGTSTEPSEGSAPGTSTEPSEGSAPGTSTEPSEGSAPGSPAGSPTSTEEGTSTEP |
| | SEGSAPGTSESATPESGPGSEPATSGSETPGTSESATPESGPGSEPATSGSETPGTSESATPESGPGT |
| | STEPSEGSAPGTSESATPESGPGSPAGSPTSTEEGSPAGSPTSTEEGSPAGSPTSTEEGTSESATPES |
| | GPGTSTEPSEGSAPGTSESATPESGPGSEPATSGSETPGTSESATPESGPGSEPATSGSETPGTSESA |
| | TPESGPGTSTEPSEGSAPGSPAGSPTSTEEGTSESATPESGPGSEPATSGSETPGTSESATPESGPGS |
| | PAGSPTSTEEGSPAGSPTSTEEGTSTEPSEGSAPGTSESATPESGPGTSESATPESGPGTSESATPES |
| | GPGSEPATSGSETPGSEPATSGSETPGSPAGSPTSTEEGTSTEPSEGSAPGTSTEPSEGSAPGSEPAT |
| | SGSETPGTSESATPESGPGTSTEPSEGSAP |
| AM923 | MAEPAGSPTSTEEGASPGTSSTGSPGSSTPSGATGSPGSSTPSGATGSPGTSTEPSEGSAPGSEPAT |
| | SGSETPGSPAGSPTSTEEGSTSSTAESPGPGTSTPESGSASPGSTSESPSGTAPGSTSESPSGTAPGT |
| | STPESGSASPGTSTPESGSASPGSEPATSGSETPGTSESATPESGPGSPAGSPTSTEEGTSTEPSEGS |
| | APGTSESATPESGPGTSTEPSEGSAPGTSTEPSEGSAPGSPAGSPTSTEEGTSTEPSEGSAPGTSTEP |
| | SEGSAPGTSESATPESGPGTSESATPESGPGTSTEPSEGSAPGTSTEPSEGSAPGTSESATPESGPGT |
| | STEPSEGSAPGSEPATSGSETPGSPAGSPTSTEEGSSTPSGATGSPGTPGSGTASSSPGSSTPSGAT |
| | GSPGTSTEPSEGSAPGTSTEPSEGSAPGSEPATSGSETPGSPAGSPTSTEEGSPAGSPTSTEEGTSTE |
| | PSEGSAPGASASGAPSTGGTSESATPESGPGSPAGSPTSTEEGSPAGSPTSTEEGSTSSTAESPGPG |
| | STSESPSGTAPGTSPSGESSTAPGTPGSGTASSSPGSSTPSGATGSPGSSPSASTGTGPGSEPATSGS |
| | ETPGTSESATPESGPGSEPATSGSETPGSTSSTAESPGPGSTSSTAESPGPGTSPSGESSTAPGSEPA |
| | TSGSETPGSEPATSGSETPGTSTEPSEGSAPGSTSSTAESPGPGTSTPESGSASPGSTSESPSGTAPG |
| | TSTEPSEGSAPGTSTEPSEGSAPGTSTEPSEGSAPGSSTPSGATGSPGSSPSASTGTGPGASPGTSST |
| | GSPGSEPATSGSETPGTSESATPESGPGSPAGSPTSTEEGSSTPSGATGSPGSSPSASTGTGPGASP |
| | GTSSTGSPGTSESATPESGPGTSTEPSEGSAPGTSTEPSEGSAP |
| AM1318 | GTSTEPSEGSAPGSEPATSGSETPGSPAGSPTSTEEGSTSSTAESPGPGTSTPESGSASPGSTSESPS |
| | GTAPGSTSESPSGTAPGTSTPESGSASPGTSTPESGSASPGSEPATSGSETPGTSESATPESGPGSPA |
| | GSPTSTEEGTSTEPSEGSAPGTSESATPESGPGTSTEPSEGSAPGTSTEPSEGSAPGSPAGSPTSTEE |
| | GTSTEPSEGSAPGTSTEPSEGSAPGTSESATPESGPGTSESATPESGPGTSTEPSEGSAPGTSTEPSE |
| | GSAPGTSESATPESGPGTSTEPSEGSAPGSEPATSGSETPGSPAGSPTSTEEGSSTPSGATGSPGTP |
| | GSGTASSSPGSSTPSGATGSPGTSTEPSEGSAPGTSTEPSEGSAPGSEPATSGSETPGSPAGSPTSTE |
| | EGSPAGSPTSTEEGTSTEPSEGSAPGPEPTGPAPSGGSEPATSGSETPGTSESATPESGPGSPAGSP |
| | TSTEEGTSESATPESGPGSPAGSPTSTEEGSPAGSPTSTEEGTSESATPESGPGSPAGSPTSTEEGSP |
| | AGSPTSTEEGSTSSTAESPGPGSTSESPSGTAPGTSPSGESSTAPGSTSESPSGTAPGSTSESPSGTA |
| | PGTSPSGESSTAPGTSTEPSEGSAPGTSESATPESGPGTSESATPESGPGSEPATSGSETPGTSESAT |
| | PESGPGTSESATPESGPGTSTEPSEGSAPGTSESATPESGPGTSTEPSEGSAPGTSPSGESSTAPGTS |
| | PSGESSTAPGTSPSGESSTAPGTSTEPSEGSAPGSPAGSPTSTEEGTSTEPSEGSAPGSSPSASTGTG |
| | PGSSTPSGATGSPGSSTPSGATGSPGSSTPSGATGSPGSSTPSGATGSPGASPGTSSTGSPGASASG |
| | APSTGGTSPSGESSTAPGSTSSTAESPGPGTSPSGESSTAPGTSESATPESGPGTSTEPSEGSAPGTS |
| | TEPSEGSAPGSSPSASTGTGPGSSTPSGATGSPGASPGTSSTGSPGTSTPESGSASPGTSPSGESSTA |
| | PGTSPSGESSTAPGTSESATPESGPGSEPATSGSETPGTSTEPSEGSAPGSTSESPSGTAPGSTSESP |
| | SGTAPGTSTPESGSASPGSPAGSPTSTEEGTSESATPESGPGTSTEPSEGSAPGSPAGSPTSTEEGTS |
| | ESATPESGPGSEPATSGSETPGSSTPSGATGSPGASPGTSSTGSPGSSTPSGATGSPGSTSESPSGTA |
| | PGTSPSGESSTAPGSTSSTAESPGPGSSTPSGATGSPGASPGTSSTGSPGTPGSGTASSSPGSPAGSP |
| | TSTEEGSPAGSPTSTEEGTSTEPSEGSAP |
| BC 864 | GTSTEPSEPGSAGTSTEPSEPGSAGSEPATSGTEPSGSGASEPTSTEPGSEPATSGTEPSGSEPATSG |
| | TEPSGSEPATSGTEPSGSGASEPTSTEPGTSTEPSEPGSAGSEPATSGTEPSGTSTEPSEPGSAGSEP |
| | ATSGTEPSGSEPATSGTEPSGTSTEPSEPGSAGTSTEPSEPGSAGSEPATSGTEPSGSEPATSGTEPS |
| | GTSEPSTSEPGAGSGASEPTSTEPGTSEPSTSEPGAGSEPATSGTEPSGSEPATSGTEPSGTSTEPSE |
| | PGSAGTSTEPSEPGSAGSGASEPTSTEPGSEPATSGTEPSGSEPATSGTEPSGSEPATSGTEPSGSEP |
| | ATSGTEPSGTSTEPSEPGSAGSEPATSGTEPSGSGASEPTSTEPGTSTEPSEPGSAGSEPATSGTEPS |
| | GSGASEPTSTEPGTSTEPSEPGSAGSGASEPTSTEPGSEPATSGTEPSGSGASEPTSTEPGSEPATSG |
| | TEPSGSGASEPTSTEPGTSTEPSEPGSAGSEPATSGTEPSGSGASEPTSTEPGTSTEPSEPGSAGSEP |
| | ATSGTEPSGTSTEPSEPGSAGSEPATSGTEPSGTSTEPSEPGSAGTSTEPSEPGSAGTSTEPSEPGSA |
| | GTSTEPSEPGSAGTSTEPSEPGSAGTSTEPSEPGSAGTSEPSTSEPGAGSGASEPTSTEPGTSTEPSE |
| | PGSAGTSTEPSEPGSAGTSTEPSEPGSAGSEPATSGTEPSGSGASEPTSTEPGSEPATSGTEPSGSEP |
| | ATSGTEPSGSEPATSGTEPSGSEPATSGTEPSGTSEPSTSEPGAGSEPATSGTEPSGSGASEPTSTEP |
| | GTSTEPSEPGSAGSEPATSGTEPSGSGASEPTSTEPGTSTEPSEPGSA |
| BD864 | GSETATSGSETAGTSESATSESGAGSTAGSETSTEAGTSESATSESGAGSETATSGSETAGSETAT |
| | SGSETAGTSTEASEGSASGTSTEASEGSASGTSESATSESGAGSETATSGSETAGTSTEASEGSAS |
| | GSTAGSETSTEAGTSESATSESGAGTSESATSESGAGSETATSGSETAGTSESATSESGAGTSTEA |
| | SEGSASGSETATSGSETAGSETATSGSETAGTSTEASEGSASGSTAGSETSTEAGTSESATSESGA |
| | GTSTEASEGSASGSETATSGSETAGSTAGSETSTEAGSTAGSETSTEAGSETATSGSETAGTSESA |
| | TSESGAGTSESATSESGAGSETATSGSETAGTSESATSESGAGTSESATSESGAGSETATSGSETA |
| | GSETATSGSETAGTSTEASEGSASGSTAGSETSTEAGSETATSGSETAGTSESATSESGAGSTAGS |
| | ETSTEAGSTAGSETSTEAGSTAGSETSTEAGTSTEASEGSASGSTAGSETSTEAGSTAGSETSTEA |
| | GTSTEASEGSASGSTAGSETSTEAGSETATSGSETAGTSTEASEGSASGTSESATSESGAGSETAT |
| | SGSETAGTSESATSESGAGTSESATSESGAGSETATSGSETAGTSESATSESGAGSETATSGSETA |
| | GTSTEASEGSASGTSTEASEGSASGSTAGSETSTEAGSTAGSETSTEAGSETATSGSETAGTSESA |
| | TSESGAGTSESATSESGAGSETATSGSETAGSETATSGSETAGSETATSGSETAGTSTEASEGSAS |
| | GTSESATSESGAGSETATSGSETAGSETATSGSETAGTSESATSESGAGTSESATSESGAGSETAT |
| | SGSETA |
| AE948 | GTSTEPSEGSAPGTSESATPESGPGSEPATSGSETPGTSESATPESGPGTSTEPSEGSAPGSPAGSPT |
| | STEEGTSTEPSEGSAPGSEPATSGSETPGTSESATPESGPGTSESATPESGPGSEPATSGSETPGTST |
| | EPSEGSAPGTSESATPESGPGTSTEPSEGSAPGTSTEPSEGSAPGSEPATSGSETPGTSTEPSEGSAP |
| | GSEPATSGSETPGSEPATSGSETPGTSTEPSEGSAPGSEPATSGSETPGSEPATSGSETPGTSTEPSE |
| | GSAPGSEPATSGSETPGSPAGSPTSTEEGTSESATPESGPGTSTEPSEGSAPGSEPATSGSETPGTSE |
| | SATPESGPGSEPATSGSETPGSEPATSGSETPGTSESATPESGPGSPAGSPTSTEEGTSESATPESGP |
| | GSPAGSPTSTEEGTSTEPSEGSAPGTSESATPESGPGTSTEPSEGSAPGTSTEPSEGSAPGSPAGSPT |
| | STEEGTSTEPSEGSAPGTSESATPESGPGSPAGSPTSTEEGSPAGSPTSTEEGTSESATPESGPGTSE |
| | SATPESGPGTSTEPSEGSAPGSPAGSPTSTEEGTSESATPESGPGTSTEPSEGSAPGSEPATSGSETP |
| | GSPAGSPTSTEEGTSESATPESGPGTSTEPSEGSAPGSEPATSGSETPGSEPATSGSETPGSEPATSG |
| | SETPGSPAGSPTSTEEGTSESATPESGPGSEPATSGSETPGSEPATSGSETPGSPAGSPTSTEEGSPA |
| | GSPTSTEEGSPAGSPTSTEEGTSESATPESGPGSEPATSGSETPGTSTEPSEGSAPGTSTEPSEGSAP |
| | GSPAGSPTSTEEGSPAGSPTSTEEGSPAGSPTSTEEGTSTEPSEGSAPGTSESATPESGPGTSESATP |
| | ESGPGTSTEPSEGSAPGTSTEPSEGSAPGTSTEPSEGSAPGTSESATPESGPGTSESATPESGP |
| AE1044 | GSEPATSGSETPGSEPATSGSETPGTSTEPSEGSAPGTSESATPESGPGSPAGSPTSTEEGTSTEPSE |
| | GSAPGTSESATPESGPGTSESATPESGPGSEPATSGSETPGSEPATSGSETPGTSESATPESGPGTSE |
| | SATPESGPGSPAGSPTSTEEGTSTEPSEGSAPGSEPATSGSETPGTSTEPSEGSAPGSPAGSPTSTEE |
| | GSPAGSPTSTEEGSPAGSPTSTEEGTSTEPSEGSAPGTSESATPESGPGSEPATSGSETPGTSESATP |
| | ESGPGTSESATPESGPGSPAGSPTSTEEGTSTEPSEGSAPGSEPATSGSETPGTSTEPSEGSAPGTSE |
| | SATPESGPGSPAGSPTSTEEGTSTEPSEGSAPGTSTEPSEGSAPGSPAGSPTSTEEGTSTEPSEGSAP |
| | GTSESATPESGPGSPAGSPTSTEEGTSESATPESGPGSEPATSGSETPGTSTEPSEGSAPGSEPATSG |
| | SETPGTSESATPESGPGTSTEPSEGSAPGTSESATPESGPGTSTEPSEGSAPGTSTEPSEGSAPGSEP |
| | ATSGSETPGSPAGSPTSTEEGTSESATPESGPGTSTEPSEGSAPGSPAGSPTSTEEGTSTEPSEGSAP |
| | GTSESATPESGPGTSTEPSEGSAPGSEPATSGSETPGSEPATSGSETPGTSESATPESGPGTSESATP |
| | ESGPGTSESATPESGPGTSTEPSEGSAPGTSTEPSEGSAPGSPAGSPTSTEEGSPAGSPTSTEEGTSE |
| | SATPESGPGSPAGSPTSTEEGSPAGSPTSTEEGTSESATPESGPGSEPATSGSETPGTSTEPSEGSAP |
| | GSEPATSGSETPGSPAGSPTSTEEGTSESATPESGPGTSESATPESGPGSEPATSGSETPGTSTEPSE |
| | GSAPGTSTEPSEGSAPGSPAGSPTSTEEGTSTEPSEGSAPGTSTEPSEGSAPGSEPATSGSETPGSP |
| | AGSPTSTEEGTSESATPESGPGTSTEPSEGSAPGSPAGSPTSTEEGTSESATPESGPGTSESATPESG |
| | PGTST |
| AE1140 | GSEPATSGSETPGSEPATSGSETPGTSTEPSEGSAPGSEPATSGSETPGTSESATPESGPGSEPATSG |
| | SETPGSPAGSPTSTEEGTSESATPESGPGSEPATSGSETPGTSTEPSEGSAPGTSESATPESGPGTSE |
| | SATPESGPGTSTEPSEGSAPGTSTEPSEGSAPGSEPATSGSETPGSPAGSPTSTEEGTSTEPSEGSAP |
| | GSEPATSGSETPGSPAGSPTSTEEGTSTEPSEGSAPGTSESATPESGPGSPAGSPTSTEEGTSTEPSE |
| | GSAPGTSESATPESGPGSEPATSGSETPGTSESATPESGPGSEPATSGSETPGTSTEPSEGSAPGTST |
| | EPSEGSAPGTSTEPSEGSAPGSPAGSPTSTEEGSPAGSPTSTEEGTSESATPESGPGTSTEPSEGSAP |
| | GTSTEPSEGSAPGSPAGSPTSTEEGSPAGSPTSTEEGSPAGSPTSTEEGTSESATPESGPGSEPATSG |
| | SETPGTSESATPESGPGSPAGSPTSTEEGTSTEPSEGSAPGTSESATPESGPGSEPATSGSETPGSPA |
| | GSPTSTEEGTSTEPSEGSAPGTSESATPESGPGTSESATPESGPGSPAGSPTSTEEGTSTEPSEGSAP |
| | GSPAGSPTSTEEGSPAGSPTSTEEGTSESATPESGPGSEPATSGSETPGTSTEPSEGSAPGSEPATSG |
| | SETPGTSESATPESGPGTSTEPSEGSAPGTSESATPESGPGTSESATPESGPGTSTEPSEGSAPGTST |
| | EPSEGSAPGSEPATSGSETPGTSESATPESGPGTSTEPSEGSAPGSEPATSGSETPGSPAGSPTSTEE |
| | GTSESATPESGPGSPAGSPTSTEEGTSTEPSEGSAPGSEPATSGSETPGSEPATSGSETPGSEPATSG |
| | SETPGTSESATPESGPGTSESATPESGPGTSTEPSEGSAPGTSTEPSEGSAPGSEPATSGSETPGTST |
| | EPSEGSAPGTSESATPESGPGSPAGSPTSTEEGSPAGSPTSTEEGTSTEPSEGSAPGSPAGSPTSTEE |
| | GSPA |
| AE1236 | GSPAGSPTSTEEGTSTEPSEGSAPGSPAGSPTSTEEGTSESATPESGPGSEPATSGSETPGTSTEPSE |
| | GSAPGTSTEPSEGSAPGTSESATPESGPGTSTEPSEGSAPGTSTEPSEGSAPGSEPATSGSETPGSP |
| | AGSPTSTEEGTSESATPESGPGSPAGSPTSTEEGTSTEPSEGSAPGSPAGSPTSTEEGTSTEPSEGSA |
| | PGSPAGSPTSTEEGTSTEPSEGSAPGSPAGSPTSTEEGSPAGSPTSTEEGTSTEPSEGSAPGSEPATS |
| | GSETPGSPAGSPTSTEEGTSESATPESGPGSEPATSGSETPGSEPATSGSETPGTSESATPESGPGSP |
| | AGSPTSTEEGTSESATPESGPGSEPATSGSETPGSEPATSGSETPGTSESATPESGPGTSESATPESG |
| | PGTSTEPSEGSAPGTSTEPSEGSAPGTSESATPESGPGSPAGSPTSTEEGTSTEPSEGSAPGSEPATS |
| | GSETPGSPAGSPTSTEEGTSTEPSEGSAPGTSTEPSEGSAPGSPAGSPTSTEEGSPAGSPTSTEEGSP |
| | AGSPTSTEEGTSESATPESGPGSEPATSGSETPGTSESATPESGPGTSESATPESGPGTSTEPSEGSA |
| | PGTSESATPESGPGSPAGSPTSTEEGTSESATPESGPGTSESATPESGPGTSTEPSEGSAPGSEPATS |
| | GSETPGTSTEPSEGSAPGSPAGSPTSTEEGTSESATPESGPGTSTEPSEGSAPGTSTEPSEGSAPGSE |
| | PATSGSETPGSEPATSGSETPGTSESATPESGPGSEPATSGSETPGSPAGSPTSTEEGTSESATPESG |
| | PGSEPATSGSETPGTSTEPSEGSAPGTSESATPESGPGTSESATPESGPGTSTEPSEGSAPGSEPATS |
| | GSETPGTSTEPSEGSAPGSPAGSPTSTEEGSPAGSPTSTEEGTSESATPESGPGSEPATSGSETPGSP |
| | AGSPTSTEEGSPAGSPTSTEEGTSESATPESGPGSEPATSGSETPGTSTEPSEGSAPGTSTEPSEGSA |
| | PGSEP |
| AE1332 | GSPAGSPTSTEEGTSTEPSEGSAPGTSESATPESGPGTSESATPESGPGSEPATSGSETPGTSTEPSE |
| | GSAPGTSESATPESGPGSPAGSPTSTEEGTSTEPSEGSAPGTSESATPESGPGSPAGSPTSTEEGTST |
| | EPSEGSAPGTSESATPESGPGTSTEPSEGSAPGSEPATSGSETPGSEPATSGSETPGSEPATSGSETP |
| | GTSESATPESGPGSPAGSPTSTEEGTSESATPESGPGSEPATSGSETPGTSESATPESGPGTSESATP |
| | ESGPGSPAGSPTSTEEGTSTEPSEGSAPGTSESATPESGPGTSTEPSEGSAPGTSTEPSEGSAPGTST |
| | EPSEGSAPGSEPATSGSETPGTSTEPSEGSAPGTSESATPESGPGTSESATPESGPGTSTEPSEGSAP |
| | GTSESATPESGPGTSESATPESGPGSEPATSGSETPGTSTEPSEGSAPGTSESATPESGPGSPAGSPT |
| | STEEGSPAGSPTSTEEGTSTEPSEGSAPGSEPATSGSETPGSEPATSGSETPGTSTEPSEGSAPGSEP |
| | ATSGSETPGSPAGSPTSTEEGTSESATPESGPGSEPATSGSETPGSEPATSGSETPGTSESATPESGP |
| | GTSESATPESGPGTSTEPSEGSAPGSPAGSPTSTEEGTSESATPESGPGTSTEPSEGSAPGSEPATSG |
| | SETPGSPAGSPTSTEEGTSTEPSEGSAPGTSTEPSEGSAPGSEPATSGSETPGTSESATPESGPGTST |
| | EPSEGSAPGSPAGSPTSTEEGTSESATPESGPGTSESATPESGPGTSTEPSEGSAPGSEPATSGSETP |
| | GSEPATSGSETPGTSTEPSEGSAPGTSESATPESGPGSPAGSPTSTEEGTSTEPSEGSAPGTSTEPSE |
| | GSAPGSPAGSPTSTEEGSPAGSPTSTEEGTSTEPSEGSAPGSEPATSGSETPGSPAGSPTSTEEGTSE |
| | SATPESGPGSEPATSGSETPGSEPATSGSETPGTSESATPESGPGTSESATPESGPGTSTEPSEGSAP |
| | GTST |
| AE1428 | GSEPATSGSETPGSPAGSPTSTEEGTSTEPSEGSAPGSEPATSGSETPGTSESATPESGPGTSTEPSE |
| | GSAPGTSESATPESGPGSPAGSPTSTEEGTSTEPSEGSAPGTSTEPSEGSAPGSPAGSPTSTEEGTST |
| | EPSEGSAPGTSESATPESGPGSEPATSGSETPGTSESATPESGPGSEPATSGSETPGTSTEPSEGSAP |
| | GTSTEPSEGSAPGSEPATSGSETPGTSTEPSEGSAPGTSTEPSEGSAPGSPAGSPTSTEEGTSTEPSE |
| | GSAPGTSESATPESGPGTSESATPESGPGTSTEPSEGSAPGTSTEPSEGSAPGSPAGSPTSTEEGSP |
| | AGSPTSTEEGTSTEPSEGSAPGSEPATSGSETPGSPAGSPTSTEEGTSTEPSEGSAPGSPAGSPTSTE |
| | EGSPAGSPTSTEEGTSESATPESGPGSEPATSGSETPGSEPATSGSETPGTSTEPSEGSAPGSPAGSP |
| | TSTEEGSPAGSPTSTEEGTSESATPESGPGSEPATSGSETPGSEPATSGSETPGTSESATPESGPGSE |
| | PATSGSETPGSEPATSGSETPGTSESATPESGPGTSESATPESGPGTSESATPESGPGTSESATPESG |
| | PGSPAGSPTSTEEGTSTEPSEGSAPGTSESATPESGPGTSTEPSEGSAPGTSTEPSEGSAPGTSESAT |
| | PESGPGTSTEPSEGSAPGTSESATPESGPGSPAGSPTSTEEGTSTEPSEGSAPGSEPATSGSETPGTS |
| | TEPSEGSAPGSEPATSGSETPGTSTEPSEGSAPGTSTEPSEGSAPGSPAGSPTSTEEGTSESATPESG |
| | PGTSTEPSEGSAPGSEPATSGSETPGTSESATPESGPGTSESATPESGPGTSESATPESGPGTSTEPS |
| | EGSAPGSEPATSGSETPGSPAGSPTSTEEGTSESATPESGPGTSTEPSEGSAPGTSTEPSEGSAPGSP |
| | AGSPTSTEEGTSESATPESGPGTSTEPSEGSAPGTSTEPSEGSAPGSPAGSPTSTEEGTSESATPESG |
| | PGSPA |
| AE1524 | GTSTEPSEGSAPGTSTEPSEGSAPGTSTEPSEGSAPGTSTEPSEGSAPGSPAGSPTSTEEGSPAGSPT |
| | STEEGTSESATPESGPGSEPATSGSETPGTSTEPSEGSAPGTSESATPESGPGTSTEPSEGSAPGTSE |
| | SATPESGPGTSESATPESGPGSPAGSPTSTEEGTSTEPSEGSAPGSEPATSGSETPGTSTEPSEGSAP |
| | GSPAGSPTSTEEGTSTEPSEGSAPGSPAGSPTSTEEGSPAGSPTSTEEGSPAGSPTSTEEGTSESATP |
| | ESGPGSEPATSGSETPGTSESATPESGPGTSESATPESGPGSPAGSPTSTEEGTSTEPSEGSAPGSEP |
| | ATSGSETPGTSTEPSEGSAPGSPAGSPTSTEEGSPAGSPTSTEEGTSTEPSEGSAPGSEPATSGSETP |
| | GSPAGSPTSTEEGTSESATPESGPGSEPATSGSETPGSPAGSPTSTEEGTSESATPESGPGTSESATP |
| | ESGPGTSTEPSEGSAPGSEPATSGSETPGSEPATSGSETPGTSESATPESGPGSEPATSGSETPGTST |
| | EPSEGSAPGSPAGSPTSTEEGTSTEPSEGSAPGSEPATSGSETPGSEPATSGSETPGSPAGSPTSTEE |
| | GTSESATPESGPGTSTEPSEGSAPGSPAGSPTSTEEGSPAGSPTSTEEGTSESATPESGPGSPAGSPT |
| | STEEGTSTEPSEGSAPGSEPATSGSETPGSEPATSGSETPGSEPATSGSETPGTSESATPESGPGTSE |
| | SATPESGPGTSTEPSEGSAPGTSTEPSEGSAPGSEPATSGSETPGTSTEPSEGSAPGTSESATPESGP |
| | GSPAGSPTSTEEGSPAGSPTSTEEGTSTEPSEGSAPGTSESATPESGPGSPAGSPTSTEEGTSTEPSE |
| | GSAPGSEPATSGSETPGTSESATPESGPGSEPATSGSETPGTSESATPESGPGSEPATSGSETPGSEP |
| | ATSGSETPGTSTEPSEGSAPGTSESATPESGPGTSTEPSEGSAPGTSTEPSEGSAPGTSESATPESGP |
| | GSPA |
| AE1620 | GSEPATSGSETPGTSTEPSEGSAPGSEPATSGSETPGTSTEPSEGSAPGTSESATPESGPGTSESATP |
| | ESGPGSEPATSGSETPGTSTEPSEGSAPGTSTEPSEGSAPGTSESATPESGPGTSTEPSEGSAPGTST |
| | EPSEGSAPGSEPATSGSETPGSPAGSPTSTEEGTSESATPESGPGTSESATPESGPGTSTEPSEGSAP |
| | GTSESATPESGPGSEPATSGSETPGTSESATPESGPGTSESATPESGPGTSTEPSEGSAPGTSTEPSE |
| | GSAPGSEPATSGSETPGSPAGSPTSTEEGTSESATPESGPGSEPATSGSETPGSEPATSGSETPGTSE |
| | SATPESGPGTSESATPESGPGSPAGSPTSTEEGTSTEPSEGSAPGTSESATPESGPGTSTEPSEGSAP |
| | GTSTEPSEGSAPGTSESATPESGPGTSTEPSEGSAPGSPAGSPTSTEEGSPAGSPTSTEEGTSESATP |
| | ESGPGSEPATSGSETPGSEPATSGSETPGTSTEPSEGSAPGTSESATPESGPGSPAGSPTSTEEGSPA |
| | GSPTSTEEGTSTEPSEGSAPGSPAGSPTSTEEGSPAGSPTSTEEGTSESATPESGPGSEPATSGSETP |
| | GTSTEPSEGSAPGTSTEPSEGSAPGSEPATSGSETPGSPAGSPTSTEEGTSESATPESGPGSPAGSPT |
| | STEEGTSTEPSEGSAPGTSESATPESGPGSEPATSGSETPGTSESATPESGPGTSESATPESGPGSPA |
| | GSPTSTEEGTSTEPSEGSAPGSEPATSGSETPGSPAGSPTSTEEGTSTEPSEGSAPGSEPATSGSETP |
| | GSEPATSGSETPGTSESATPESGPGTSESATPESGPGTSTEPSEGSAPGTSESATPESGPGSEPATSG |
| | SETPGTSESATPESGPGTSESATPESGPGTSTEPSEGSAPGTSESATPESGPGSEPATSGSETPGTST |
| | EPSEGSAPGSPAGSPTSTEEGTSESATPESGPGTSTEPSEGSAPGTSTEPSEGSAPGSPAGSPTSTEE |
| | GTST |
| AE1716 | GTSESATPESGPGTSTEPSEGSAPGTSESATPESGPGTSTEPSEGSAPGSEPATSGSETPGSPAGSPT |
| | STEEGTSESATPESGPGSEPATSGSETPGSEPATSGSETPGTSESATPESGPGTSESATPESGPGTST |
| | EPSEGSAPGSEPATSGSETPGSEPATSGSETPGTSESATPESGPGTSESATPESGPGSEPATSGSETP |
| | GTSESATPESGPGSPAGSPTSTEEGSPAGSPTSTEEGTSTEPSEGSAPGSEPATSGSETPGSPAGSPT |
| | STEEGTSESATPESGPGSPAGSPTSTEEGTSTEPSEGSAPGSEPATSGSETPGSPAGSPTSTEEGTSE |
| | SATPESGPGSPAGSPTSTEEGSPAGSPTSTEEGTSTEPSEGSAPGSEPATSGSETPGSPAGSPTSTEE |
| | GTSESATPESGPGTSTEPSEGSAPGSPAGSPTSTEEGTSESATPESGPGSEPATSGSETPGTSTEPSE |
| | GSAPGSPAGSPTSTEEGTSTEPSEGSAPGTSESATPESGPGTSESATPESGPGTSTEPSEGSAPGTST |
| | EPSEGSAPGSEPATSGSETPGTSESATPESGPGTSESATPESGPGTSTEPSEGSAPGTSTEPSEGSAP |
| | GSPAGSPTSTEEGSPAGSPTSTEEGTSTEPSEGSAPGSEPATSGSETPGSEPATSGSETPGTSESATP |
| | ESGPGSPAGSPTSTEEGTSESATPESGPGTSTEPSEGSAPGTSTEPSEGSAPGSPAGSPTSTEEGSPA |
| | GSPTSTEEGTSESATPESGPGSPAGSPTSTEEGTSTEPSEGSAPGSEPATSGSETPGSPAGSPTSTEE |
| | GSPAGSPTSTEEGTSTEPSEGSAPGTSESATPESGPGTSESATPESGPGSPAGSPTSTEEGTSTEPSE |
| | GSAPGSPAGSPTSTEEGTSTEPSEGSAPGSPAGSPTSTEEGTSTEPSEGSAPGTSTEPSEGSAPGSEP |
| | ATSGSETPGSPAGSPTSTEEGTSESATPESGPGSEPATSGSETPGSPAGSPTSTEEGTSESATPESGP |
| | GTSE |
| AE1812 | GTSESATPESGPGSPAGSPTSTEEGSPAGSPTSTEEGTSESATPESGPGSEPATSGSETPGTSTEPSE |
| | GSAPGTSTEPSEGSAPGTSTEPSEGSAPGSPAGSPTSTEEGTSTEPSEGSAPGTSESATPESGPGTSE |
| | SATPESGPGSPAGSPTSTEEGSPAGSPTSTEEGSPAGSPTSTEEGTSESATPESGPGSEPATSGSETP |
| | GTSESATPESGPGTSTEPSEGSAPGTSESATPESGPGTSTEPSEGSAPGTSTEPSEGSAPGTSESATP |
| | ESGPGSPAGSPTSTEEGTSESATPESGPGTSTEPSEGSAPGSPAGSPTSTEEGTSESATPESGPGSEP |
| | ATSGSETPGTSTEPSEGSAPGSEPATSGSETPGSEPATSGSETPGTSESATPESGPGTSESATPESGP |
| | GTSTEPSEGSAPGTSESATPESGPGSPAGSPTSTEEGTSTEPSEGSAPGSEPATSGSETPGTSESATP |
| | ESGPGSEPATSGSETPGTSTEPSEGSAPGTSESATPESGPGSPAGSPTSTEEGSPAGSPTSTEEGSPA |
| | GSPTSTEEGTSESATPESGPGSEPATSGSETPGTSESATPESGPGTSESATPESGPGSEPATSGSETP |
| | GTSTEPSEGSAPGTSTEPSEGSAPGTSTEPSEGSAPGTSESATPESGPGSEPATSGSETPGTSESATP |
| | ESGPGSEPATSGSETPGTSTEPSEGSAPGSEPATSGSETPGSPAGSPTSTEEGTSESATPESGPGTSE |
| | SATPESGPGTSESATPESGPGSPAGSPTSTEEGTSTEPSEGSAPGTSESATPESGPGTSESATPESGP |
| | GTSTEPSEGSAPGTSTEPSEGSAPGSPAGSPTSTEEGTSESATPESGPGSEPATSGSETPGTSESATP |
| | ESGPGTSESATPESGPGTSTEPSEGSAPGSEPATSGSETPGTSESATPESGPGSPAGSPTSTEEGTST |
| | EPSEGSAPGSEPATSGSETPGSPAGSPTSTEEGTSESATPESGPGSPAGSPTSTEEGTSTEPSEGSAP |
| | GSEP |
| AE1908 | GSEPATSGSETPGTSTEPSEGSAPGTSESATPESGPGSEPATSGSETPGTSTEPSEGSAPGSPAGSPT |
| | STEEGTSESATPESGPGSPAGSPTSTEEGTSTEPSEGSAPGSEPATSGSETPGTSTEPSEGSAPGTSE |
| | SATPESGPGSEPATSGSETPGSEPATSGSETPGTSESATPESGPGTSTEPSEGSAPGTSESATPESGP |
| | GTSESATPESGPGSPAGSPTSTEEGSPAGSPTSTEEGTSESATPESGPGTSESATPESGPGTSTEPSE |
| | GSAPGTSTEPSEGSAPGSPAGSPTSTEEGTSTEPSEGSAPGSEPATSGSETPGSEPATSGSETPGSEP |
| | ATSGSETPGSEPATSGSETPGTSESATPESGPGTSESATPESGPGTSESATPESGPGTSTEPSEGSAP |
| | GTSESATPESGPGTSESATPESGPGTSTEPSEGSAPGSPAGSPTSTEEGTSTEPSEGSAPGSEPATSG |
| | SETPGSPAGSPTSTEEGTSESATPESGPGTSTEPSEGSAPGSEPATSGSETPGTSESATPESGPGTSE |
| | SATPESGPGTSTEPSEGSAPGSEPATSGSETPGSPAGSPTSTEEGTSESATPESGPGTSESATPESGP |
| | GTSTEPSEGSAPGSEPATSGSETPGSPAGSPTSTEEGTSESATPESGPGSEPATSGSETPGTSTEPSE |
| | GSAPGSEPATSGSETPGSPAGSPTSTEEGTSESATPESGPGTSTEPSEGSAPGSEPATSGSETPGTSE |
| | SATPESGPGTSESATPESGPGSPAGSPTSTEEGTSTEPSEGSAPGSPAGSPTSTEEGSPAGSPTSTEE |
| | GSPAGSPTSTEEGTSESATPESGPGSEPATSGSETPGTSTEPSEGSAPGTSTEPSEGSAPGTSESATP |
| | ESGPGTSTEPSEGSAPGTSESATPESGPGSEPATSGSETPGTSTEPSEGSAPGTSESATPESGPGSPA |
| | GSPTSTEEGSPAGSPTSTEEGSPAGSPTSTEEGTSESATPESGPGSPAGSPTSTEEGTSESATPESGP |
| | GSEP |
| AE2004A | GTSTEPSEGSAPGSEPATSGSETPGTSTEPSEGSAPGTSTEPSEGSAPGSEPATSGSETPGSPAGSPT |
| | STEEGSPAGSPTSTEEGTSESATPESGPGSEPATSGSETPGTSTEPSEGSAPGTSTEPSEGSAPGSPA |
| | GSPTSTEEGTSESATPESGPGTSESATPESGPGSPAGSPTSTEEGTSTEPSEGSAPGTSESATPESGP |
| | GTSTEPSEGSAPGSEPATSGSETPGTSESATPESGPGSEPATSGSETPGTSTEPSEGSAPGTSTEPSE |
| | GSAPGSPAGSPTSTEEGSPAGSPTSTEEGTSESATPESGPGSPAGSPTSTEEGTSTEPSEGSAPGSEP |
| | ATSGSETPGSEPATSGSETPGSPAGSPTSTEEGTSESATPESGPGTSTEPSEGSAPGSEPATSGSETP |
| | GTSESATPESGPGSEPATSGSETPGSPAGSPTSTEEGTSESATPESGPGTSESATPESGPGSEPATSG |
| | SETPGTSESATPESGPGTSESATPESGPGTSESATPESGPGTSTEPSEGSAPGTSESATPESGPGSEP |
| | ATSGSETPGTSTEPSEGSAPGSPAGSPTSTEEGTSTEPSEGSAPGSEPATSGSETPGSPAGSPTSTEE |
| | GTSESATPESGPGTSESATPESGPGTSTEPSEGSAPGTSESATPESGPGTSTEPSEGSAPGTSESATP |
| | ESGPGSEPATSGSETPGTSTEPSEGSAPGTSTEPSEGSAPGSPAGSPTSTEEGSPAGSPTSTEEGTSE |
| | SATPESGPGTSTEPSEGSAPGTSESATPESGPGSPAGSPTSTEEGSPAGSPTSTEEGSPAGSPTSTEE |
| | GTSTEPSEGSAPGSPAGSPTSTEEGSPAGSPTSTEEGTSESATPESGPGSEPATSGSETPGSEPATSG |
| | SETPGTSESATPESGPGSEPATSGSETPGTSESATPESGPGTSTEPSEGSAPGTSTEPSEGSAPGSPA |
| | GSPTSTEEGSPAGSPTSTEEGTSESATPESGPGSPAGSPTSTEEGTSTEPSEGSAPGTSESATPESGP |
| | GTSE |
| AG948 | GSSTPSGATGSPGTPGSGTASSSPGASPGTSSTGSPGSSPSASTGTGPGTPGSGTASSSPGTPGSGT |
| | ASSSPGTPGSGTASSSPGSSPSASTGTGPGTPGSGTASSSPGSSPSASTGTGPGSSTPSGATGSPGSS |
| | TPSGATGSPGSSPSASTGTGPGSSTPSGATGSPGASPGTSSTGSPGASPGTSSTGSPGSSPSASTGT |
| | GPGSSPSASTGTGPGASPGTSSTGSPGSSPSASTGTGPGASPGTSSTGSPGSSPSASTGTGPGASPG |
| | TSSTGSPGTPGSGTASSSPGTPGSGTASSSPGSSTPSGATGSPGSSTPSGATGSPGSSTPSGATGSP |
| | GASPGTSSTGSPGSSPSASTGTGPGASPGTSSTGSPGASPGTSSTGSPGSSTPSGATGSPGSSPSAS |
| | TGTGPGSSPSASTGTGPGTPGSGTASSSPGASPGTSSTGSPGTPGSGTASSSPGSSTPSGATGSPGS |
| | STPSGATGSPGSSPSASTGTGPGSSPSASTGTGPGSSTPSGATGSPGASPGTSSTGSPGTPGSGTAS |
| | SSPGSSPSASTGTGPGSSTPSGATGSPGASPGTSSTGSPGSSTPSGATGSPGTPGSGTASSSPGSSPS |
| | ASTGTGPGSSTPSGATGSPGASPGTSSTGSPGASPGTSSTGSPGTPGSGTASSSPGTPGSGTASSSP |
| | GSSPSASTGTGPGASPGTSSTGSPGASPGTSSTGSPGTPGSGTASSSPGTPGSGTASSSPGSSTPSG |
| | ATGSPGSSPSASTGTGPGSSTPSGATGSPGSSPSASTGTGPGSSPSASTGTGPGTPGSGTASSSPGS |
| | STPSGATGSPGASPGTSSTGSPGTPGSGTASSSPGTPGSGTASSSPGSSTPSGATGSPGTPGSGTAS |
| | SSPGASPGTSSTGSPGSSTPSGATGSPGSSTPSGATGSPGTPGSGTASSSPGSSTPSGATGSPGSSTP |
| | SGATGSP |
| AG1044 | GTPGSGTASSSPGTPGSGTASSSPGSSPSASTGTGPGTPGSGTASSSPGASPGTSSTGSPGTPGSGT |
| | ASSSPGSSPSASTGTGPGSSTPSGATGSPGASPGTSSTGSPGASPGTSSTGSPGSSPSASTGTGPGSS |
| | TPSGATGSPGSSPSASTGTGPGSSPSASTGTGPGTPGSGTASSSPGTPGSGTASSSPGASPGTSSTG |
| | SPGSSTPSGATGSPGSSPSASTGTGPGTPGSGTASSSPGASPGTSSTGSPGTPGSGTASSSPGSSPSA |
| | STGTGPGSSPSASTGTGPGASPGTSSTGSPGASPGTSSTGSPGSSTPSGATGSPGSSTPSGATGSPG |
| | TPGSGTASSSPGSSPSASTGTGPGSSTPSGATGSPGASPGTSSTGSPGSSTPSGATGSPGSSTPSGA |
| | TGSPGSSPSASTGTGPGASPGTSSTGSPGTPGSGTASSSPGASPGTSSTGSPGSSPSASTGTGPGTP |
| | GSGTASSSPGASPGTSSTGSPGASPGTSSTGSPGSSTPSGATGSPGTPGSGTASSSPGSSTPSGATG |
| | SPGASPGTSSTGSPGTPGSGTASSSPGTPGSGTASSSPGSSTPSGATGSPGSSTPSGATGSPGTPGS |
| | GTASSSPGSSTPSGATGSPGSSTPSGATGSPGASPGTSSTGSPGSSPSASTGTGPGSSPSASTGTGP |
| | GASPGTSSTGSPGASPGTSSTGSPGTPGSGTASSSPGSSPSASTGTGPGTPGSGTASSSPGSSTPSG |
| | ATGSPGSSTPSGATGSPGASPGTSSTGSPGSSPSASTGTGPGASPGTSSTGSPGSSPSASTGTGPGS |
| | SPSASTGTGPGASPGTSSTGSPGASPGTSSTGSPGSSTPSGATGSPGASPGTSSTGSPGASPGTSST |
| | GSPGTPGSGTASSSPGTPGSGTASSSPGTPGSGTASSSPGSSTPSGATGSPGSSTPSGATGSPGSSPS |
| | ASTGTGPGSSPSASTGTGPGTPGSGTASSSPGSSPSASTGTGPGASPGTSSTGSPGSSTPSGATGSP |
| | GTPGSGTASSSPGSST |
| AG1140 | GASPGTSSTGSPGSSPSASTGTGPGSSTPSGATGSPGASPGTSSTGSPGASPGTSSTGSPGSSTPSG |
| | ATGSPGTPGSGTASSSPGASPGTSSTGSPGTPGSGTASSSPGTPGSGTASSSPGSSTPSGATGSPGS |
| | STPSGATGSPGTPGSGTASSSPGSSTPSGATGSPGSSTPSGATGSPGSSPSASTGTGPGSSPSASTG |
| | TGPGASPGTSSTGSPGTPGSGTASSSPGASPGTSSTGSPGSSTPSGATGSPGTPGSGTASSSPGSSP |
| | SASTGTGPGSSTPSGATGSPGSSPSASTGTGPGSSTPSGATGSPGASPGTSSTGSPGSSPSASTGTG |
| | PGTPGSGTASSSPGASPGTSSTGSPGSSTPSGATGSPGASPGTSSTGSPGSSPSASTGTGPGTPGSG |
| | TASSSPGTPGSGTASSSPGASPGTSSTGSPGTPGSGTASSSPGTPGSGTASSSPGSSPSASTGTGPG |
| | ASPGTSSTGSPGSSTPSGATGSPGASPGTSSTGSPGSSPSASTGTGPGTPGSGTASSSPGSSPSAST |
| | GTGPGSSPSASTGTGPGASPGTSSTGSPGASPGTSSTGSPGTPGSGTASSSPGASPGTSSTGSPGAS |
| | PGTSSTGSPGTPGSGTASSSPGTPGSGTASSSPGSSTPSGATGSPGSSTPSGATGSPGTPGSGTASS |
| | SPGSSPSASTGTGPGTPGSGTASSSPGSSTPSGATGSPGSSTPSGATGSPGASPGTSSTGSPGTPGS |
| | GTASSSPGASPGTSSTGSPGSSTPSGATGSPGSSTPSGATGSPGTPGSGTASSSPGSSTPSGATGSP |
| | GSSTPSGATGSPGASPGTSSTGSPGSSPSASTGTGPGSSTPSGATGSPGSSTPSGATGSPGSSPSAS |
| | TGTGPGSSPSASTGTGPGSSTPSGATGSPGASPGTSSTGSPGSSPSASTGTGPGTPGSGTASSSPGA |
| | SPGTSSTGSPGSSPSASTGTGPGASPGTSSTGSPGSSTPSGATGSPGSSPSASTGTGPGSSPSASTGT |
| | GPGASPGTSSTGSPGSST |
| AG1236 | GSSPSASTGTGPGTPGSGTASSSPGSSPSASTGTGPGSSPSASTGTGPGTPGSGTASSSPGASPGTS |
| | STGSPGSSTPSGATGSPGTPGSGTASSSPGASPGTSSTGSPGTPGSGTASSSPGTPGSGTASSSPGS |
| | SPSASTGTGPGSSPSASTGTGPGSSTPSGATGSPGASPGTSSTGSPGSSPSASTGTGPGTPGSGTAS |
| | SSPGTPGSGTASSSPGSSTPSGATGSPGASPGTSSTGSPGSSPSASTGTGPGTPGSGTASSSPGTPG |
| | SGTASSSPGASPGTSSTGSPGSSTPSGATGSPGSSTPSGATGSPGSSPSASTGTGPGSSPSASTGTG |
| | PGASPGTSSTGSPGSSPSASTGTGPGSSTPSGATGSPGASPGTSSTGSPGASPGTSSTGSPGSSTPS |
| | GATGSPGSSPSASTGTGPGASPGTSSTGSPGASPGTSSTGSPGTPGSGTASSSPGSSTPSGATGSPG |
| | ASPGTSSTGSPGSSTPSGATGSPGTPGSGTASSSPGSSPSASTGTGPGSSTPSGATGSPGTPGSGTA |
| | SSSPGSSTPSGATGSPGSSTPSGATGSPGASPGTSSTGSPGSSPSASTGTGPGSSPSASTGTGPGASP |
| | GTSSTGSPGSSPSASTGTGPGTPGSGTASSSPGTPGSGTASSSPGASPGTSSTGSPGTPGSGTASSS |
| | PGASPGTSSTGSPGTPGSGTASSSPGASPGTSSTGSPGSSTPSGATGSPGASPGTSSTGSPGSSPSAS |
| | TGTGPGTPGSGTASSSPGTPGSGTASSSPGSSPSASTGTGPGTPGSGTASSSPGASPGTSSTGSPGS |
| | STPSGATGSPGTPGSGTASSSPGASPGTSSTGSPGTPGSGTASSSPGTPGSGTASSSPGSSTPSGAT |
| | GSPGTPGSGTASSSPGSSPSASTGTGPGSSTPSGATGSPGTPGSGTASSSPGSSTPSGATGSPGSST |
| | PSGATGSPGSSPSASTGTGPGASPGTSSTGSPGTPGSGTASSSPGSSPSASTGTGPGSSPSASTGTG |
| | PGASPGTSSTGSPGASP |
| AG1332 | GSSTPSGATGSPGSSPSASTGTGPGTPGSGTASSSPGSSPSASTGTGPGASPGTSSTGSPGSSPSAS |
| | TGTGPGTPGSGTASSSPGASPGTSSTGSPGSSTPSGATGSPGSSPSASTGTGPGSSTPSGATGSPGA |
| | SPGTSSTGSPGTPGSGTASSSPGASPGTSSTGSPGSSTPSGATGSPGSSTPSGATGSPGSSPSASTGT |
| | GPGTPGSGTASSSPGSSTPSGATGSPGSSTPSGATGSPGSSPSASTGTGPGTPGSGTASSSPGASPG |
| | TSSTGSPGTPGSGTASSSPGASPGTSSTGSPGASPGTSSTGSPGTPGSGTASSSPGTPGSGTASSSP |
| | GSSTPSGATGSPGSSTPSGATGSPGSSTPSGATGSPGASPGTSSTGSPGSSPSASTGTGPGSSTPSG |
| | ATGSPGSSPSASTGTGPGSSTPSGATGSPGTPGSGTASSSPGSSPSASTGTGPGSSTPSGATGSPGA |
| | SPGTSSTGSPGASPGTSSTGSPGSSPSASTGTGPGASPGTSSTGSPGSSTPSGATGSPGASPGTSST |
| | GSPGTPGSGTASSSPGTPGSGTASSSPGSSPSASTGTGPGTPGSGTASSSPGSSTPSGATGSPGSSPS |
| | ASTGTGPGSSTPSGATGSPGTPGSGTASSSPGTPGSGTASSSPGSSPSASTGTGPGSSTPSGATGSP |
| | GSSTPSGATGSPGSSPSASTGTGPGSSPSASTGTGPGASPGTSSTGSPGASPGTSSTGSPGSSTPSG |
| | ATGSPGASPGTSSTGSPGSSPSASTGTGPGTPGSGTASSSPGASPGTSSTGSPGASPGTSSTGSPGT |
| | PGSGTASSSPGTPGSGTASSSPGSSPSASTGTGPGTPGSGTASSSPGASPGTSSTGSPGSSTPSGAT |
| | GSPGTPGSGTASSSPGTPGSGTASSSPGSSTPSGATGSPGSSTPSGATGSPGTPGSGTASSSPGSSPS |
| | ASTGTGPGSSPSASTGTGPGASPGTSSTGSPGSSPSASTGTGPGSSPSASTGTGPGASPGTSSTGSP |
| | GASPGTSSTGSPGTPG |
| AG1428 | GTPGSGTASSSPGSSTPSGATGSPGASPGTSSTGSPGSSTPSGATGSPGTPGSGTASSSPGTPGSGT |
| | ASSSPGSSTPSGATGSPGSSTPSGATGSPGASPGTSSTGSPGSSPSASTGTGPGSSTPSGATGSPGA |
| | SPGTSSTGSPGSSPSASTGTGPGTPGSGTASSSPGASPGTSSTGSPGASPGTSSTGSPGTPGSGTAS |
| | SSPGTPGSGTASSSPGASPGTSSTGSPGASPGTSSTGSPGTPGSGTASSSPGTPGSGTASSSPGSSPS |
| | ASTGTGPGSSPSASTGTGPGASPGTSSTGSPGSSPSASTGTGPGSSPSASTGTGPGASPGTSSTGSP |
| | GASPGTSSTGSPGTPGSGTASSSPGTPGSGTASSSPGSSPSASTGTGPGASPGTSSTGSPGSSTPSG |
| | ATGSPGASPGTSSTGSPGSSPSASTGTGPGSSTPSGATGSPGSSPSASTGTGPGSSPSASTGTGPGA |
| | SPGTSSTGSPGSSPSASTGTGPGSSPSASTGTGPGASPGTSSTGSPGASPGTSSTGSPGSSPSASTGT |
| | GPGTPGSGTASSSPGASPGTSSTGSPGSSTPSGATGSPGTPGSGTASSSPGTPGSGTASSSPGSSPS |
| | ASTGTGPGSSTPSGATGSPGASPGTSSTGSPGASPGTSSTGSPGSSTPSGATGSPGSSPSASTGTGP |
| | GASPGTSSTGSPGSSTPSGATGSPGTPGSGTASSSPGASPGTSSTGSPGTPGSGTASSSPGASPGTS |
| | STGSPGSSTPSGATGSPGSSTPSGATGSPGASPGTSSTGSPGSSPSASTGTGPGTPGSGTASSSPGT |
| | PGSGTASSSPGSSTPSGATGSPGTPGSGTASSSPGASPGTSSTGSPGSSTPSGATGSPGTPGSGTAS |
| | SSPGSSPSASTGTGPGSSTPSGATGSPGSSTPSGATGSPGSSPSASTGTGPGSSTPSGATGSPGTPG |
| | SGTASSSPGSSPSASTGTGPGTPGSGTASSSPGSSTPSGATGSPGSSPSASTGTGPGSSPSASTGTG |
| | PGTPGSGTASSSPGASP |
| AG1524 | GSSTPSGATGSPGTPGSGTASSSPGTPGSGTASSSPGASPGTSSTGSPGSSTPSGATGSPGTPGSGT |
| | ASSSPGSSTPSGATGSPGSSPSASTGTGPGSSTPSGATGSPGTPGSGTASSSPGTPGSGTASSSPGSS |
| | PSASTGTGPGSSTPSGATGSPGSSPSASTGTGPGTPGSGTASSSPGASPGTSSTGSPGSSTPSGATG |
| | SPGASPGTSSTGSPGTPGSGTASSSPGSSTPSGATGSPGTPGSGTASSSPGSSPSASTGTGPGASPG |
| | TSSTGSPGASPGTSSTGSPGTPGSGTASSSPGSSTPSGATGSPGSSTPSGATGSPGSSPSASTGTGP |
| | GSSPSASTGTGPGASPGTSSTGSPGTPGSGTASSSPGTPGSGTASSSPGSSPSASTGTGPGASPGTS |
| | STGSPGASPGTSSTGSPGTPGSGTASSSPGSSPSASTGTGPGASPGTSSTGSPGASPGTSSTGSPGS |
| | STPSGATGSPGSSPSASTGTGPGSSPSASTGTGPGTPGSGTASSSPGTPGSGTASSSPGASPGTSST |
| | GSPGSSTPSGATGSPGTPGSGTASSSPGASPGTSSTGSPGTPGSGTASSSPGTPGSGTASSSPGSST |
| | PSGATGSPGSSTPSGATGSPGTPGSGTASSSPGSSPSASTGTGPGSSTPSGATGSPGSSTPSGATGS |
| | PGSSPSASTGTGPGTPGSGTASSSPGSSPSASTGTGPGASPGTSSTGSPGSSPSASTGTGPGTPGSG |
| | TASSSPGASPGTSSTGSPGASPGTSSTGSPGTPGSGTASSSPGTPGSGTASSSPGSSTPSGATGSPG |
| | TPGSGTASSSPGASPGTSSTGSPGSSTPSGATGSPGSSTPSGATGSPGSSTPSGATGSPGTPGSGTA |
| | SSSPGSSPSASTGTGPGSSPSASTGTGPGSSPSASTGTGPGASPGTSSTGSPGASPGTSSTGSPGSSP |
| | SASTGTGPGTPGSGTASSSPGASPGTSSTGSPGSSTPSGATGSPGASPGTSSTGSPGASPGTSSTGS |
| | PGSSTPSGATGSPGTPG |
| AG1620 | GSSTPSGATGSPGSSTPSGATGSPGTPGSGTASSSPGSSPSASTGTGPGTPGSGTASSSPGASPGTS |
| | STGSPGSSTPSGATGSPGASPGTSSTGSPGTPGSGTASSSPGASPGTSSTGSPGSSPSASTGTGPGT |
| | PGSGTASSSPGASPGTSSTGSPGSSTPSGATGSPGSSPSASTGTGPGSSTPSGATGSPGASPGTSST |
| | GSPGASPGTSSTGSPGASPGTSSTGSPGSSTPSGATGSPGASPGTSSTGSPGTPGSGTASSSPGSST |
| | PSGATGSPGSSTPSGATGSPGSSPSASTGTGPGSSPSASTGTGPGSSTPSGATGSPGSSPSASTGTG |
| | PGSSPSASTGTGPGASPGTSSTGSPGASPGTSSTGSPGTPGSGTASSSPGSSPSASTGTGPGSSPSAS |
| | TGTGPGASPGTSSTGSPGSSPSASTGTGPGTPGSGTASSSPGSSPSASTGTGPGSSTPSGATGSPGA |
| | SPGTSSTGSPGSSTPSGATGSPGTPGSGTASSSPGSSPSASTGTGPGASPGTSSTGSPGSSTPSGAT |
| | GSPGASPGTSSTGSPGASPGTSSTGSPGTPGSGTASSSPGASPGTSSTGSPGASPGTSSTGSPGSST |
| | PSGATGSPGTPGSGTASSSPGSSPSASTGTGPGSSTPSGATGSPGTPGSGTASSSPGSSTPSGATGS |
| | PGSSTPSGATGSPGSSPSASTGTGPGSSPSASTGTGPGSSTPSGATGSPGASPGTSSTGSPGSSPSAS |
| | TGTGPGTPGSGTASSSPGASPGTSSTGSPGSSPSASTGTGPGSSTPSGATGSPGSSPSASTGTGPGS |
| | STPSGATGSPGSSPSASTGTGPGTPGSGTASSSPGTPGSGTASSSPGSSTPSGATGSPGSSTPSGAT |
| | GSPGTPGSGTASSSPGSSPSASTGTGPGSSTPSGATGSPGSSPSASTGTGPGSSPSASTGTGPGSST |
| | PSGATGSPGASPGTSSTGSPGASPGTSSTGSPGTPGSGTASSSPGTPGSGTASSSPGTPGSGTASSS |
| | PGSSTPSGATGSPGSST |
| AG1716 | GASPGTSSTGSPGSSPSASTGTGPGSSTPSGATGSPGSSPSASTGTGPGTPGSGTASSSPGSSTPSG |
| | ATGSPGSSTPSGATGSPGSSPSASTGTGPGSSTPSGATGSPGTPGSGTASSSPGSSPSASTGTGPGS |
| | STPSGATGSPGASPGTSSTGSPGSSPSASTGTGPGSSPSASTGTGPGTPGSGTASSSPGASPGTSST |
| | GSPGSSTPSGATGSPGSSPSASTGTGPGASPGTSSTGSPGSSTPSGATGSPGTPGSGTASSSPGSSPS |
| | ASTGTGPGSSPSASTGTGPGSSPSASTGTGPGTPGSGTASSSPGTPGSGTASSSPGSSTPSGATGSP |
| | GTPGSGTASSSPGSSPSASTGTGPGASPGTSSTGSPGASPGTSSTGSPGTPGSGTASSSPGSSPSAS |
| | TGTGPGASPGTSSTGSPGTPGSGTASSSPGSSTPSGATGSPGSSTPSGATGSPGASPGTSSTGSPGT |
| | PGSGTASSSPGSSPSASTGTGPGTPGSGTASSSPGASPGTSSTGSPGSSTPSGATGSPGASPGTSST |
| | GSPGASPGTSSTGSPGTPGSGTASSSPGTPGSGTASSSPGSSPSASTGTGPGSSPSASTGTGPGSSPS |
| | ASTGTGPGTPGSGTASSSPGASPGTSSTGSPGSSTPSGATGSPGASPGTSSTGSPGSSPSASTGTGP |
| | GASPGTSSTGSPGSSPSASTGTGPGASPGTSSTGSPGSSPSASTGTGPGSSPSASTGTGPGTPGSGT |
| | ASSSPGASPGTSSTGSPGTPGSGTASSSPGTPGSGTASSSPGASPGTSSTGSPGSSTPSGATGSPGSS |
| | TPSGATGSPGSSPSASTGTGPGSSTPSGATGSPGTPGSGTASSSPGSSPSASTGTGPGSSTPSGATG |
| | SPGSSTPSGATGSPGSSPSASTGTGPGSSPSASTGTGPGASPGTSSTGSPGTPGSGTASSSPGSSPSA |
| | STGTGPGSSTPSGATGSPGASPGTSSTGSPGASPGTSSTGSPGSSPSASTGTGPGASPGTSSTGSPG |
| | ASPGTSSTGSPGTPG |
| AG1812 | GSSTPSGATGSPGSSPSASTGTGPGASPGTSSTGSPGASPGTSSTGSPGTPGSGTASSSPGSSPSAS |
| | TGTGPGASPGTSSTGSPGSSTPSGATGSPGSSTPSGATGSPGASPGTSSTGSPGSSPSASTGTGPGT |
| | PGSGTASSSPGTPGSGTASSSPGASPGTSSTGSPGSSTPSGATGSPGSSTPSGATGSPGSSPSASTG |
| | TGPGTPGSGTASSSPGASPGTSSTGSPGSSTPSGATGSPGTPGSGTASSSPGSSPSASTGTGPGSST |
| | PSGATGSPGTPGSGTASSSPGSSPSASTGTGPGTPGSGTASSSPGASPGTSSTGSPGSSTPSGATGS |
| | PGSSTPSGATGSPGTPGSGTASSSPGSSTPSGATGSPGSSTPSGATGSPGASPGTSSTGSPGASPGT |
| | SSTGSPGASPGTSSTGSPGSSTPSGATGSPGTPGSGTASSSPGSSPSASTGTGPGTPGSGTASSSPG |
| | ASPGTSSTGSPGTPGSGTASSSPGASPGTSSTGSPGSSTPSGATGSPGSSPSASTGTGPGSSPSAST |
| | GTGPGTPGSGTASSSPGASPGTSSTGSPGASPGTSSTGSPGTPGSGTASSSPGASPGTSSTGSPGSS |
| | TPSGATGSPGSSTPSGATGSPGSSPSASTGTGPGASPGTSSTGSPGASPGTSSTGSPGTPGSGTASS |
| | SPGTPGSGTASSSPGSSTPSGATGSPGSSPSASTGTGPGSSPSASTGTGPGASPGTSSTGSPGASPG |
| | TSSTGSPGSSTPSGATGSPGSSPSASTGTGPGASPGTSSTGSPGSSTPSGATGSPGTPGSGTASSSP |
| | GSSPSASTGTGPGASPGTSSTGSPGSSTPSGATGSPGTPGSGTASSSPGSSTPSGATGSPGSSTPSG |
| | ATGSPGSSTPSGATGSPGSSPSASTGTGPGSSPSASTGTGPGSSTPSGATGSPGSSPSASTGTGPGS |
| | SPSASTGTGPGSSTPSGATGSPGASPGTSSTGSPGASPGTSSTGSPGTPGSGTASSSPGASPGTSST |
| | GSPGSSTPSGATGSPGASP |
| AG1908 | GSSPSASTGTGPGSSPSASTGTGPGSSPSASTGTGPGTPGSGTASSSPGSSPSASTGTGPGSSPSAS |
| | TGTGPGASPGTSSTGSPGSSPSASTGTGPGTPGSGTASSSPGTPGSGTASSSPGASPGTSSTGSPGT |
| | PGSGTASSSPGTPGSGTASSSPGSSPSASTGTGPGSSTPSGATGSPGSSPSASTGTGPGASPGTSST |
| | GSPGSSPSASTGTGPGASPGTSSTGSPGASPGTSSTGSPGTPGSGTASSSPGTPGSGTASSSPGASP |
| | GTSSTGSPGTPGSGTASSSPGTPGSGTASSSPGSSPSASTGTGPGSSTPSGATGSPGASPGTSSTGS |
| | PGSSTPSGATGSPGSSPSASTGTGPGSSPSASTGTGPGSSTPSGATGSPGASPGTSSTGSPGSSPSAS |
| | TGTGPGTPGSGTASSSPGASPGTSSTGSPGASPGTSSTGSPGTPGSGTASSSPGTPGSGTASSSPGS |
| | STPSGATGSPGTPGSGTASSSPGASPGTSSTGSPGSSTPSGATGSPGTPGSGTASSSPGSSPSASTG |
| | TGPGSSPSASTGTGPGSSTPSGATGSPGASPGTSSTGSPGASPGTSSTGSPGTPGSGTASSSPGTPG |
| | SGTASSSPGSSTPSGATGSPGSSPSASTGTGPGSSPSASTGTGPGASPGTSSTGSPGASPGTSSTGS |
| | PGSSTPSGATGSPGASPGTSSTGSPGASPGTSSTGSPGTPGSGTASSSPGTPGSGTASSSPGTPGSG |
| | TASSSPGSSTPSGATGSPGSSTPSGATGSPGSSPSASTGTGPGSSPSASTGTGPGSSTPSGATGSPG |
| | TPGSGTASSSPGSSPSASTGTGPGASPGTSSTGSPGSSTPSGATGSPGSSPSASTGTGPGSSTPSGA |
| | TGSPGASPGTSSTGSPGSSPSASTGTGPGTPGSGTASSSPGSSPSASTGTGPGSSTPSGATGSPGAS |
| | PGTSSTGSPGSSPSASTGTGPGTPGSGTASSSPGSSTPSGATGSPGSSTPSGATGSPGASPGTSSTG |
| | SPGSSPSASTGTGPGSSP |
| AG2004A | GSSPSASTGTGPGTPGSGTASSSPGSSTPSGATGSPGTPGSGTASSSPGSSTPSGATGSPGSSTPSG |
| | ATGSPGSSPSASTGTGPGSSPSASTGTGPGSSPSASTGTGPGTPGSGTASSSPGASPGTSSTGSPGS |
| | STPSGATGSPGTPGSGTASSSPGTPGSGTASSSPGSSTPSGATGSPGSSTPSGATGSPGSSPSASTG |
| | TGPGASPGTSSTGSPGASPGTSSTGSPGASPGTSSTGSPGASPGTSSTGSPGTPGSGTASSSPGTPG |
| | SGTASSSPGSSPSASTGTGPGSSTPSGATGSPGASPGTSSTGSPGSSTPSGATGSPGSSTPSGATGS |
| | PGSSPSASTGTGPGASPGTSSTGSPGTPGSGTASSSPGSSPSASTGTGPGSSPSASTGTGPGASPGT |
| | SSTGSPGASPGTSSTGSPGTPGSGTASSSPGASPGTSSTGSPGTPGSGTASSSPGTPGSGTASSSPG |
| | SSTPSGATGSPGTPGSGTASSSPGASPGTSSTGSPGSSTPSGATGSPGSSTPSGATGSPGSSPSAST |
| | GTGPGSSTPSGATGSPGSSTPSGATGSPGASPGTSSTGSPGSSPSASTGTGPGTPGSGTASSSPGAS |
| | PGTSSTGSPGSSPSASTGTGPGTPGSGTASSSPGSSPSASTGTGPGTPGSGTASSSPGASPGTSSTG |
| | SPGASPGTSSTGSPGTPGSGTASSSPGTPGSGTASSSPGSSTPSGATGSPGSSTPSGATGSPGTPGS |
| | GTASSSPGSSTPSGATGSPGSSTPSGATGSPGASPGTSSTGSPGSSPSASTGTGPGSSTPSGATGSP |
| | GSSPSASTGTGPGSSPSASTGTGPGASPGTSSTGSPGSSTPSGATGSPGASPGTSSTGSPGTPGSGT |
| | ASSSPGTPGSGTASSSPGSSPSASTGTGPGASPGTSSTGSPGSSTPSGATGSPGSSPSASTGTGPGSS |
| | PSASTGTGPGASPGTSSTGSPGTPGSGTASSSPGSSTPSGATGSPGTPGSGTASSSPGSSPSASTGT |
| | GPGSSPSASTGTGPGASP |
| AE72B | SPAGSPTSTEEGSPAGSPTSTEEGTSESATPESGPGTSTEPSEGSAPGTSESATPESGPGSEPATSGS |
| | ETPG |
| AE72C | TSESATPESGPGTSESATPESGPGSEPATSGSETPGSEPATSGSETPGSPAGSPTSTEEGTSTEPSEG |
| | SAPG |
| AE108A | TEEGTSESATPESGPGTSTEPSEGSAPGSPAGSPTSTEEGTSTEPSEGSAPGTSTEPSEGSAPGTSES |
| | ATPESGPGSEPATSGSETPGSEPATSGSETPGSPAGSPTS |
| AE108B | GSPAGSPTSTEEGTSTEPSEGSAPGTSESATPESGPGTSESATPESGPGTSESATPESGPGSEPATSG |
| | SETPGSEPATSGSETPGSPAGSPTSTEEGTSTEPSEGSAP |
| AE144A | STEPSEGSAPGSPAGSPTSTEEGTSTEPSEGSAPGTSESATPESGPGSEPATSGSETPGTSESATPES |
| | GPGSEPATSGSETPGTSESATPESGPGTSTEPSEGSAPGTSESATPESGPGSPAGSPTSTEEGSPAG |
| | SPTSTEEGS |
| AE144B | SEPATSGSETPGTSESATPESGPGSEPATSGSETPGTSESATPESGPGTSTEPSEGSAPGSPAGSPTS |
| | TEEGTSESATPESGPGSEPATSGSETPGTSESATPESGPGSPAGSPTSTEEGSPAGSPTSTEEGTSTE |
| | PSEGSAPG |
| AE180A | TSTEEGTSESATPESGPGSEPATSGSETPGTSESATPESGPGSPAGSPTSTEEGSPAGSPTSTEEGTS |
| | TEPSEGSAPGTSESATPESGPGTSESATPESGPGTSESATPESGPGSEPATSGSETPGSEPATSGSET |
| | PGSPAGSPTSTEEGTSTEPSEGSAPGTSTEPSEGSAPGSEPATS |
| AE216A | PESGPGTSTEPSEGSAPGSPAGSPTSTEEGTSESATPESGPGSEPATSGSETPGTSESATPESGPGSP |
| | AGSPTSTEEGSPAGSPTSTEEGTSTEPSEGSAPGTSESATPESGPGTSESATPESGPGTSESATPESG |
| | PGSEPATSGSETPGSEPATSGSETPGSPAGSPTSTEEGTSTEPSEGSAPGTSTEPSEGSAPGSEPATS |
| | GSETPGTSESAT |
| AE252A | ESGPGSEPATSGSETPGTSESATPESGPGTSTEPSEGSAPGSPAGSPTSTEEGTSESATPESGPGSEP |
| | ATSGSETPGTSESATPESGPGSPAGSPTSTEEGSPAGSPTSTEEGTSTEPSEGSAPGTSESATPESGP |
| | GTSESATPESGPGTSESATPESGPGSEPATSGSETPGSEPATSGSETPGSPAGSPTSTEEGTSTEPSE |
| | GSAPGTSTEPSEGSAPGSEPATSGSETPGTSESATPESGPGTSTEPSE |
| AE288A | TPESGPGTSTEPSEGSAPGTSESATPESGPGSEPATSGSETPGTSESATPESGPGSEPATSGSETPGT |
| | SESATPESGPGTSTEPSEGSAPGSPAGSPTSTEEGTSESATPESGPGSEPATSGSETPGTSESATPES |
| | GPGSPAGSPTSTEEGSPAGSPTSTEEGTSTEPSEGSAPGTSESATPESGPGTSESATPESGPGTSESA |
| | TPESGPGSEPATSGSETPGSEPATSGSETPGSPAGSPTSTEEGTSTEPSEGSAPGTSTEPSEGSAPGS |
| | EPATSGSETPGTSESA |
| AE324A | PESGPGSPAGSPTSTEEGSPAGSPTSTEEGSPAGSPTSTEEGTSESATPESGPGTSTEPSEGSAPGTS |
| | ESATPESGPGSEPATSGSETPGTSESATPESGPGSEPATSGSETPGTSESATPESGPGTSTEPSEGSA |
| | PGSPAGSPTSTEEGTSESATPESGPGSEPATSGSETPGTSESATPESGPGSPAGSPTSTEEGSPAGSP |
| | TSTEEGTSTEPSEGSAPGTSESATPESGPGTSESATPESGPGTSESATPESGPGSEPATSGSETPGSE |
| | PATSGSETPGSPAGSPTSTEEGTSTEPSEGSAPGTSTEPSEGSAPGSEPATS |
| AE360A | PESGPGTSTEPSEGSAPGTSESATPESGPGSPAGSPTSTEEGSPAGSPTSTEEGSPAGSPTSTEEGTS |
| | ESATPESGPGTSTEPSEGSAPGTSESATPESGPGSEPATSGSETPGTSESATPESGPGSEPATSGSET |
| | PGTSESATPESGPGTSTEPSEGSAPGSPAGSPTSTEEGTSESATPESGPGSEPATSGSETPGTSESAT |
| | PESGPGSPAGSPTSTEEGSPAGSPTSTEEGTSTEPSEGSAPGTSESATPESGPGTSESATPESGPGTS |
| | ESATPESGPGSEPATSGSETPGSEPATSGSETPGSPAGSPTSTEEGTSTEPSEGSAPGTSTEPSEGSA |
| | PGSEPATSGSETPGTSESAT |
| AE396A | PESGPGSEPATSGSETPGTSESATPESGPGTSTEPSEGSAPGTSESATPESGPGSPAGSPTSTEEGSP |
| | AGSPTSTEEGSPAGSPTSTEEGTSESATPESGPGTSTEPSEGSAPGTSESATPESGPGSEPATSGSET |
| | PGTSESATPESGPGSEPATSGSETPGTSESATPESGPGTSTEPSEGSAPGSPAGSPTSTEEGTSESAT |
| | PESGPGSEPATSGSETPGTSESATPESGPGSPAGSPTSTEEGSPAGSPTSTEEGTSTEPSEGSAPGTS |
| | ESATPESGPGTSESATPESGPGTSESATPESGPGSEPATSGSETPGSEPATSGSETPGSPAGSPTSTE |
| | EGTSTEPSEGSAPGTSTEPS |
| AE432A | EGSAPGSPAGSPTSTEEGTSTEPSEGSAPGTSESATPESGPGSEPATSGSETPGTSESATPESGPGSE |
| | PATSGSETPGTSESATPESGPGTSTEPSEGSAPGTSESATPESGPGSPAGSPTSTEEGSPAGSPTSTE |
| | EGSPAGSPTSTEEGTSESATPESGPGTSTEPSEGSAPGTSESATPESGPGSEPATSGSETPGTSESAT |
| | PESGPGSEPATSGSETPGTSESATPESGPGTSTEPSEGSAPGSPAGSPTSTEEGTSESATPESGPGSE |
| | PATSGSETPGTSESATPESGPGSPAGSPTSTEEGSPAGSPTSTEEGTSTEPSEGSAPGTSESATPESG |
| | PGTSESATPESGPGTSESATPESGPGSEPATSGSETPGSEPATSGSETPGSPAGSPTSTEEGTSTEPS |
| | EGSAPGTSTEPSEGSAPGSEPATS |
| AE468A | EGSAPGTSTEPSEGSAPGTSTEPSEGSAPGSPAGSPTSTEEGTSTEPSEGSAPGTSESATPESGPGSE |
| | PATSGSETPGTSESATPESGPGSEPATSGSETPGTSESATPESGPGTSTEPSEGSAPGTSESATPESG |
| | PGSPAGSPTSTEEGSPAGSPTSTEEGSPAGSPTSTEEGTSESATPESGPGTSTEPSEGSAPGTSESAT |
| | PESGPGSEPATSGSETPGTSESATPESGPGSEPATSGSETPGTSESATPESGPGTSTEPSEGSAPGSP |
| | AGSPTSTEEGTSESATPESGPGSEPATSGSETPGTSESATPESGPGSPAGSPTSTEEGSPAGSPTSTE |
| | EGTSTEPSEGSAPGTSESATPESGPGTSESATPESGPGTSESATPESGPGSEPATSGSETPGSEPATS |
| | GSETPGSPAGSPTSTEEGTSTEPSEGSAPGTSTEPSEGSAPGSEPATSGSETPGTSESAT |
| AE504A | EGSAPGTSTEPSEGSAPGTSTEPSEGSAPGTSTEPSEGSAPGTSTEPSEGSAPGSPAGSPTSTEEGTS |
| | TEPSEGSAPGTSESATPESGPGSEPATSGSETPGTSESATPESGPGSEPATSGSETPGTSESATPESG |
| | PGTSTEPSEGSAPGTSESATPESGPGSPAGSPTSTEEGSPAGSPTSTEEGSPAGSPTSTEEGTSESAT |
| | PESGPGTSTEPSEGSAPGTSESATPESGPGSEPATSGSETPGTSESATPESGPGSEPATSGSETPGTS |
| | ESATPESGPGTSTEPSEGSAPGSPAGSPTSTEEGTSESATPESGPGSEPATSGSETPGTSESATPESG |
| | PGSPAGSPTSTEEGSPAGSPTSTEEGTSTEPSEGSAPGTSESATPESGPGTSESATPESGPGTSESAT |
| | PESGPGSEPATSGSETPGSEPATSGSETPGSPAGSPTSTEEGTSTEPSEGSAPGTSTEPSEGSAPGSE |
| | PATSGSETPGTSESATPESGPGTSTEPS |
| AE540A | TPESGPGSPAGSPTSTEEGTSESATPESGPGSEPATSGSETPGTSESATPESGPGTSTEPSEGSAPGT |
| | STEPSEGSAPGTSTEPSEGSAPGTSTEPSEGSAPGTSTEPSEGSAPGTSTEPSEGSAPGSPAGSPTST |
| | EEGTSTEPSEGSAPGTSESATPESGPGSEPATSGSETPGTSESATPESGPGSEPATSGSETPGTSESA |
| | TPESGPGTSTEPSEGSAPGTSESATPESGPGSPAGSPTSTEEGSPAGSPTSTEEGSPAGSPTSTEEGT |
| | SESATPESGPGTSTEPSEGSAPGTSESATPESGPGSEPATSGSETPGTSESATPESGPGSEPATSGSE |
| | TPGTSESATPESGPGTSTEPSEGSAPGSPAGSPTSTEEGTSESATPESGPGSEPATSGSETPGTSESA |
| | TPESGPGSPAGSPTSTEEGSPAGSPTSTEEGTSTEPSEGSAPGTSESATPESGPGTSESATPESGPGT |
| | SESATPESGPGSEPATSGSETPGSEPATSGSETPGSPAGSPTSTEEGTSTEPSEGSAPGTSTEP |
| AE576A | TPESGPGTSESATPESGPGSPAGSPTSTEEGTSESATPESGPGSEPATSGSETPGTSESATPESGPGT |
| | STEPSEGSAPGTSTEPSEGSAPGTSTEPSEGSAPGTSTEPSEGSAPGTSTEPSEGSAPGTSTEPSEGS |
| | APGSPAGSPTSTEEGTSTEPSEGSAPGTSESATPESGPGSEPATSGSETPGTSESATPESGPGSEPAT |
| | SGSETPGTSESATPESGPGTSTEPSEGSAPGTSESATPESGPGSPAGSPTSTEEGSPAGSPTSTEEGS |
| | PAGSPTSTEEGTSESATPESGPGTSTEPSEGSAPGTSESATPESGPGSEPATSGSETPGTSESATPES |
| | GPGSEPATSGSETPGTSESATPESGPGTSTEPSEGSAPGSPAGSPTSTEEGTSESATPESGPGSEPAT |
| | SGSETPGTSESATPESGPGSPAGSPTSTEEGSPAGSPTSTEEGTSTEPSEGSAPGTSESATPESGPGT |
| | SESATPESGPGTSESATPESGPGSEPATSGSETPGSEPATSGSETPGSPAGSPTSTEEGTSTEPSEGS |
| | APGTSTEPSEGSAPGSEPATSGSETPGTSESA |
| AE612A | GSETPGTSTEPSEGSAPGTSTEPSEGSAPGTSESATPESGPGTSESATPESGPGSPAGSPTSTEEGTS |
| | ESATPESGPGSEPATSGSETPGTSESATPESGPGTSTEPSEGSAPGTSTEPSEGSAPGTSTEPSEGSA |
| | PGTSTEPSEGSAPGTSTEPSEGSAPGTSTEPSEGSAPGSPAGSPTSTEEGTSTEPSEGSAPGTSESAT |
| | PESGPGSEPATSGSETPGTSESATPESGPGSEPATSGSETPGTSESATPESGPGTSTEPSEGSAPGTS |
| | ESATPESGPGSPAGSPTSTEEGSPAGSPTSTEEGSPAGSPTSTEEGTSESATPESGPGTSTEPSEGSA |
| | PGTSESATPESGPGSEPATSGSETPGTSESATPESGPGSEPATSGSETPGTSESATPESGPGTSTEPS |
| | EGSAPGSPAGSPTSTEEGTSESATPESGPGSEPATSGSETPGTSESATPESGPGSPAGSPTSTEEGSP |
| | AGSPTSTEEGTSTEPSEGSAPGTSESATPESGPGTSESATPESGPGTSESATPESGPGSEPATSGSET |
| | PGSEPATSGSETPGSPAGSPTSTEEGTSTEPSEGSAPGTSTEPSEGSAPGSEPATSGSETPGTSESAT |
| AE648A | PESGPGTSTEPSEGSAPGTSESATPESGPGSEPATSGSETPGTSTEPSEGSAPGTSTEPSEGSAPGTS |
| | ESATPESGPGTSESATPESGPGSPAGSPTSTEEGTSESATPESGPGSEPATSGSETPGTSESATPESG |
| | PGTSTEPSEGSAPGTSTEPSEGSAPGTSTEPSEGSAPGTSTEPSEGSAPGTSTEPSEGSAPGTSTEPS |
| | EGSAPGSPAGSPTSTEEGTSTEPSEGSAPGTSESATPESGPGSEPATSGSETPGTSESATPESGPGSE |
| | PATSGSETPGTSESATPESGPGTSTEPSEGSAPGTSESATPESGPGSPAGSPTSTEEGSPAGSPTSTE |
| | EGSPAGSPTSTEEGTSESATPESGPGTSTEPSEGSAPGTSESATPESGPGSEPATSGSETPGTSESAT |
| | PESGPGSEPATSGSETPGTSESATPESGPGTSTEPSEGSAPGSPAGSPTSTEEGTSESATPESGPGSE |
| | PATSGSETPGTSESATPESGPGSPAGSPTSTEEGSPAGSPTSTEEGTSTEPSEGSAPGTSESATPESG |
| | PGTSESATPESGPGTSESATPESGPGSEPATSGSETPGSEPATSGSETPGSPAGSPTSTEEGTSTEPS |
| | EGSAPGTSTEPSEGSAPGSEPATSGSETPGTSESAT |
| AE684A | EGSAPGSPAGSPTSTEEGTSTEPSEGSAPGTSTEPSEGSAPGTSESATPESGPGTSTEPSEGSAPGTS |
| | ESATPESGPGSEPATSGSETPGTSTEPSEGSAPGTSTEPSEGSAPGTSESATPESGPGTSESATPESG |
| | PGSPAGSPTSTEEGTSESATPESGPGSEPATSGSETPGTSESATPESGPGTSTEPSEGSAPGTSTEPS |
| | EGSAPGTSTEPSEGSAPGTSTEPSEGSAPGTSTEPSEGSAPGTSTEPSEGSAPGSPAGSPTSTEEGTS |
| | TEPSEGSAPGTSESATPESGPGSEPATSGSETPGTSESATPESGPGSEPATSGSETPGTSESATPESG |
| | PGTSTEPSEGSAPGTSESATPESGPGSPAGSPTSTEEGSPAGSPTSTEEGSPAGSPTSTEEGTSESAT |
| | PESGPGTSTEPSEGSAPGTSESATPESGPGSEPATSGSETPGTSESATPESGPGSEPATSGSETPGTS |
| | ESATPESGPGTSTEPSEGSAPGSPAGSPTSTEEGTSESATPESGPGSEPATSGSETPGTSESATPESG |
| | PGSPAGSPTSTEEGSPAGSPTSTEEGTSTEPSEGSAPGTSESATPESGPGTSESATPESGPGTSESAT |
| | PESGPGSEPATSGSETPGSEPATSGSETPGSPAGSPTSTEEGTSTEPSEGSAPGTSTEPSEGSAPGSE |
| | PATS |
| AE720A | TSGSETPGSEPATSGSETPGSPAGSPTSTEEGTSESATPESGPGTSTEPSEGSAPGTSTEPSEGSAPG |
| | SPAGSPTSTEEGTSTEPSEGSAPGTSTEPSEGSAPGTSESATPESGPGTSTEPSEGSAPGTSESATPE |
| | SGPGSEPATSGSETPGTSTEPSEGSAPGTSTEPSEGSAPGTSESATPESGPGTSESATPESGPGSPA |
| | GSPTSTEEGTSESATPESGPGSEPATSGSETPGTSESATPESGPGTSTEPSEGSAPGTSTEPSEGSAP |
| | GTSTEPSEGSAPGTSTEPSEGSAPGTSTEPSEGSAPGTSTEPSEGSAPGSPAGSPTSTEEGTSTEPSE |
| | GSAPGTSESATPESGPGSEPATSGSETPGTSESATPESGPGSEPATSGSETPGTSESATPESGPGTST |
| | EPSEGSAPGTSESATPESGPGSPAGSPTSTEEGSPAGSPTSTEEGSPAGSPTSTEEGTSESATPESGP |
| | GTSTEPSEGSAPGTSESATPESGPGSEPATSGSETPGTSESATPESGPGSEPATSGSETPGTSESATP |
| | ESGPGTSTEPSEGSAPGSPAGSPTSTEEGTSESATPESGPGSEPATSGSETPGTSESATPESGPGSPA |
| | GSPTSTEEGSPAGSPTSTEEGTSTEPSEGSAPGTSESATPESGPGTSESATPESGPGTSESATPESGP |
| | GSEPATSGSETPGSEPATSGSETPGSPAGSPTSTEEGTSTE |
| AE756A | TSGSETPGSEPATSGSETPGSPAGSPTSTEEGTSESATPESGPGTSTEPSEGSAPGTSTEPSEGSAPG |
| | SPAGSPTSTEEGTSTEPSEGSAPGTSTEPSEGSAPGTSESATPESGPGTSTEPSEGSAPGTSESATPE |
| | SGPGSEPATSGSETPGTSTEPSEGSAPGTSTEPSEGSAPGTSESATPESGPGTSESATPESGPGSPA |
| | GSPTSTEEGTSESATPESGPGSEPATSGSETPGTSESATPESGPGTSTEPSEGSAPGTSTEPSEGSAP |
| | GTSTEPSEGSAPGTSTEPSEGSAPGTSTEPSEGSAPGTSTEPSEGSAPGSPAGSPTSTEEGTSTEPSE |
| | GSAPGTSESATPESGPGSEPATSGSETPGTSESATPESGPGSEPATSGSETPGTSESATPESGPGTST |
| | EPSEGSAPGTSESATPESGPGSPAGSPTSTEEGSPAGSPTSTEEGSPAGSPTSTEEGTSESATPESGP |
| | GTSTEPSEGSAPGTSESATPESGPGSEPATSGSETPGTSESATPESGPGSEPATSGSETPGTSESATP |
| | ESGPGTSTEPSEGSAPGSPAGSPTSTEEGTSESATPESGPGSEPATSGSETPGTSESATPESGPGSPA |
| | GSPTSTEEGSPAGSPTSTEEGTSTEPSEGSAPGTSESATPESGPGTSESATPESGPGTSESATPESGP |
| | GSEPATSGSETPGSEPATSGSETPGSPAGSPTSTEEGTSTEPSEGSAPGTSTEPSEGSAPGSEPATSG |
| | SETPGTSES |
| AE792A | EGSAPGTSESATPESGPGSEPATSGSETPGSEPATSGSETPGSPAGSPTSTEEGTSESATPESGPGTS |
| | TEPSEGSAPGTSTEPSEGSAPGSPAGSPTSTEEGTSTEPSEGSAPGTSTEPSEGSAPGTSESATPESG |
| | PGTSTEPSEGSAPGTSESATPESGPGSEPATSGSETPGTSTEPSEGSAPGTSTEPSEGSAPGTSESAT |
| | PESGPGTSESATPESGPGSPAGSPTSTEEGTSESATPESGPGSEPATSGSETPGTSESATPESGPGTS |
| | TEPSEGSAPGTSTEPSEGSAPGTSTEPSEGSAPGTSTEPSEGSAPGTSTEPSEGSAPGTSTEPSEGSA |
| | PGSPAGSPTSTEEGTSTEPSEGSAPGTSESATPESGPGSEPATSGSETPGTSESATPESGPGSEPATS |
| | GSETPGTSESATPESGPGTSTEPSEGSAPGTSESATPESGPGSPAGSPTSTEEGSPAGSPTSTEEGSP |
| | AGSPTSTEEGTSESATPESGPGTSTEPSEGSAPGTSESATPESGPGSEPATSGSETPGTSESATPESG |
| | PGSEPATSGSETPGTSESATPESGPGTSTEPSEGSAPGSPAGSPTSTEEGTSESATPESGPGSEPATS |
| | GSETPGTSESATPESGPGSPAGSPTSTEEGSPAGSPTSTEEGTSTEPSEGSAPGTSESATPESGPGTS |
| | ESATPESGPGTSESATPESGPGSEPATSGSETPGSEPATSGSETPGSPAGSPTSTEEGTSTEPSEGSA |
| | PGTSTEPSEGSAPGSEPATSGSETPGTSESATPESGPGTSTEPS |
| AE828A | PESGPGTSTEPSEGSAPGSPAGSPTSTEEGTSTEPSEGSAPGTSTEPSEGSAPGTSESATPESGPGSE |
| | PATSGSETPGSEPATSGSETPGSPAGSPTSTEEGTSESATPESGPGTSTEPSEGSAPGTSTEPSEGSA |
| | PGSPAGSPTSTEEGTSTEPSEGSAPGTSTEPSEGSAPGTSESATPESGPGTSTEPSEGSAPGTSESAT |
| | PESGPGSEPATSGSETPGTSTEPSEGSAPGTSTEPSEGSAPGTSESATPESGPGTSESATPESGPGSP |
| | AGSPTSTEEGTSESATPESGPGSEPATSGSETPGTSESATPESGPGTSTEPSEGSAPGTSTEPSEGSA |
| | PGTSTEPSEGSAPGTSTEPSEGSAPGTSTEPSEGSAPGTSTEPSEGSAPGSPAGSPTSTEEGTSTEPS |
| | EGSAPGTSESATPESGPGSEPATSGSETPGTSESATPESGPGSEPATSGSETPGTSESATPESGPGTS |
| | TEPSEGSAPGTSESATPESGPGSPAGSPTSTEEGSPAGSPTSTEEGSPAGSPTSTEEGTSESATPESG |
| | PGTSTEPSEGSAPGTSESATPESGPGSEPATSGSETPGTSESATPESGPGSEPATSGSETPGTSESAT |
| | PESGPGTSTEPSEGSAPGSPAGSPTSTEEGTSESATPESGPGSEPATSGSETPGTSESATPESGPGSP |
| | AGSPTSTEEGSPAGSPTSTEEGTSTEPSEGSAPGTSESATPESGPGTSESATPESGPGTSESATPESG |
| | PGSEPATSGSETPGSEPATSGSETPGSPAGSPTSTEEGTSTEPSEGSAPGTSTEPSEGSAPGSEPATS |
| | GSETPGTSESAT |
| AG72A | GPGSSPSASTGTGPGTPGSGTASSSPGSSTPSGATGSPGSSPSASTGTGPGASPGTSSTGSPGTPGS |
| | GTASS |
| AG72B | GSSTPSGATGSPGSSTPSGATGSPGSSPSASTGTGPGSSPSASTGTGPGASPGTSSTGSPGTPGSGT |
| | ASSSP |
| AG72C | SPSASTGTGPGASPGTSSTGSPGSSPSASTGTGPGTPGSGTASSSPGSSTPSGATGSPGSSTPSGAT |
| | GSPGA |
| AG108A | SASTGTGPGSSPSASTGTGPGTPGSGTASSSPGSSTPSGATGSPGSSPSASTGTGPGASPGTSSTGS |
| | PGTPGSGTASSSPGSSTPSGATGSPGTPGSGTASSSPGASP |
| AG108B | PGTPGSGTASSSPGSSTPSGATGSPGTPGSGTASSSPGSSTPSGATGSPGSSTPSGATGSPGSSPSAS |
| | TGTGPGSSPSASTGTGPGASPGTSSTGSPGTPGSGTASSS |
| AG144A | PGSSPSASTGTGPGSSPSASTGTGPGTPGSGTASSSPGSSTPSGATGSPGSSPSASTGTGPGASPGT |
| | SSTGSPGTPGSGTASSSPGSSTPSGATGSPGTPGSGTASSSPGASPGTSSTGSPGASPGTSSTGSPG |
| | TPGSGTASSS |
| AG144B | PSGATGSPGTPGSGTASSSPGSSTPSGATGSPGSSTPSGATGSPGSSPSASTGTGPGSSPSASTGTG |
| | PGASPGTSSTGSPGTPGSGTASSSPGSSTPSGATGSPGSSPSASTGTGPGSSPSASTGTGPGASPGT |
| | SSTGSPGASP |
| AG180A | TSSTGSPGSSPSASTGTGPGSSPSASTGTGPGTPGSGTASSSPGSSTPSGATGSPGSSPSASTGTGP |
| | GASPGTSSTGSPGTPGSGTASSSPGSSTPSGATGSPGTPGSGTASSSPGASPGTSSTGSPGASPGTS |
| | STGSPGTPGSGTASSSPGSSTPSGATGSPGASPGTSSTGSPGTPGS |
| AG216A | TGTGPGSSPSASTGTGPGTPGSGTASSSPGSSTPSGATGSPGSSPSASTGTGPGASPGTSSTGSPGT |
| | PGSGTASSSPGSSTPSGATGSPGTPGSGTASSSPGASPGTSSTGSPGASPGTSSTGSPGTPGSGTAS |
| | SSPGSSTPSGATGSPGASPGTSSTGSPGTPGSGTASSSPGSSTPSGATGSPGSSPSASTGTGPGSSPS |
| | ASTGTGPGSSTPSG |
| AG252A | TSSTGSPGSSPSASTGTGPGSSPSASTGTGPGTPGSGTASSSPGSSTPSGATGSPGSSPSASTGTGP |
| | GASPGTSSTGSPGTPGSGTASSSPGSSTPSGATGSPGTPGSGTASSSPGASPGTSSTGSPGASPGTS |
| | STGSPGTPGSGTASSSPGSSTPSGATGSPGASPGTSSTGSPGTPGSGTASSSPGSSTPSGATGSPGS |
| | SPSASTGTGPGSSPSASTGTGPGSSTPSGATGSPGSSTPSGATGSPGASPG |
| AG288A | TSSTGSPGSSPSASTGTGPGSSPSASTGTGPGTPGSGTASSSPGSSTPSGATGSPGSSPSASTGTGP |
| | GASPGTSSTGSPGTPGSGTASSSPGSSTPSGATGSPGTPGSGTASSSPGASPGTSSTGSPGASPGTS |
| | STGSPGTPGSGTASSSPGSSTPSGATGSPGASPGTSSTGSPGTPGSGTASSSPGSSTPSGATGSPGS |
| | SPSASTGTGPGSSPSASTGTGPGSSTPSGATGSPGSSTPSGATGSPGASPGTSSTGSPGASPGTSST |
| | GSPGASPGTSSTGSPGTPGS |
| AG324A | TSSTGSPGTPGSGTASSSPGASPGTSSTGSPGASPGTSSTGSPGASPGTSSTGSPGASPGTSSTGSP |
| | GTPGSGTASSSPGSSTPSGATGSPGTPGSGTASSSPGSSTPSGATGSPGTPGSGTASSSPGSSTPSG |
| | ATGSPGSSTPSGATGSPGSSPSASTGTGPGSSPSASTGTGPGASPGTSSTGSPGTPGSGTASSSPGS |
| | STPSGATGSPGSSPSASTGTGPGSSPSASTGTGPGASPGTSSTGSPGASPGTSSTGSPGSSTPSGAT |
| | GSPGSSPSASTGTGPGASPGTSSTGSPGSSPSASTGTGPGTPGSGTASSSPGSSTP |
| AG360A | TSSTGSPGASPGTSSTGSPGTPGSGTASSSPGASPGTSSTGSPGASPGTSSTGSPGASPGTSSTGSP |
| | GASPGTSSTGSPGTPGSGTASSSPGSSTPSGATGSPGTPGSGTASSSPGSSTPSGATGSPGTPGSGT |
| | ASSSPGSSTPSGATGSPGSSTPSGATGSPGSSPSASTGTGPGSSPSASTGTGPGASPGTSSTGSPGT |
| | PGSGTASSSPGSSTPSGATGSPGSSPSASTGTGPGSSPSASTGTGPGASPGTSSTGSPGASPGTSST |
| | GSPGSSTPSGATGSPGSSPSASTGTGPGASPGTSSTGSPGSSPSASTGTGPGTPGSGTASSSPGSST |
| | PSGATGSPGSSTPSGATGSPGASPG |
| AG396A | GATGSPGSSTPSGATGSPGSSPSASTGTGPGASPGTSSTGSPGASPGTSSTGSPGTPGSGTASSSPG |
| | ASPGTSSTGSPGASPGTSSTGSPGASPGTSSTGSPGASPGTSSTGSPGTPGSGTASSSPGSSTPSGA |
| | TGSPGTPGSGTASSSPGSSTPSGATGSPGTPGSGTASSSPGSSTPSGATGSPGSSTPSGATGSPGSS |
| | PSASTGTGPGSSPSASTGTGPGASPGTSSTGSPGTPGSGTASSSPGSSTPSGATGSPGSSPSASTGT |
| | GPGSSPSASTGTGPGASPGTSSTGSPGASPGTSSTGSPGSSTPSGATGSPGSSPSASTGTGPGASPG |
| | TSSTGSPGSSPSASTGTGPGTPGSGTASSSPGSSTPSGATGSPGSSTPSGATGSPGASPGT |
| AG432A | GATGSPGSSTPSGATGSPGASPGTSSTGSPGTPGSGTASSSPGSSTPSGATGSPGSSTPSGATGSPG |
| | SSTPSGATGSPGSSPSASTGTGPGASPGTSSTGSPGASPGTSSTGSPGTPGSGTASSSPGASPGTSS |
| | TGSPGASPGTSSTGSPGASPGTSSTGSPGASPGTSSTGSPGTPGSGTASSSPGSSTPSGATGSPGTP |
| | GSGTASSSPGSSTPSGATGSPGTPGSGTASSSPGSSTPSGATGSPGSSTPSGATGSPGSSPSASTGT |
| | GPGSSPSASTGTGPGASPGTSSTGSPGTPGSGTASSSPGSSTPSGATGSPGSSPSASTGTGPGSSPS |
| | ASTGTGPGASPGTSSTGSPGASPGTSSTGSPGSSTPSGATGSPGSSPSASTGTGPGASPGTSSTGSP |
| | GSSPSASTGTGPGTPGSGTASSSPGSSTPS |
| AG468A | TSSTGSPGSSPSASTGTGPGTPGSGTASSSPGASPGTSSTGSPGASPGTSSTGSPGASPGTSSTGSP |
| | GSSTPSGATGSPGSSTPSGATGSPGASPGTSSTGSPGTPGSGTASSSPGSSTPSGATGSPGSSTPSG |
| | ATGSPGSSTPSGATGSPGSSPSASTGTGPGASPGTSSTGSPGASPGTSSTGSPGTPGSGTASSSPGA |
| | SPGTSSTGSPGASPGTSSTGSPGASPGTSSTGSPGASPGTSSTGSPGTPGSGTASSSPGSSTPSGAT |
| | GSPGTPGSGTASSSPGSSTPSGATGSPGTPGSGTASSSPGSSTPSGATGSPGSSTPSGATGSPGSSPS |
| | ASTGTGPGSSPSASTGTGPGASPGTSSTGSPGTPGSGTASSSPGSSTPSGATGSPGSSPSASTGTGP |
| | GSSPSASTGTGPGASPGTSSTGSPGASPGTSSTGSPGSSTPSGATGSPGSSPSASTGTGPGASPG |
| AG504A | TSSTGSPGSSPSASTGTGPGTPGSGTASSSPGASPGTSSTGSPGASPGTSSTGSPGASPGTSSTGSP |
| | GSSTPSGATGSPGSSTPSGATGSPGASPGTSSTGSPGTPGSGTASSSPGSSTPSGATGSPGSSTPSG |
| | ATGSPGSSTPSGATGSPGSSPSASTGTGPGASPGTSSTGSPGASPGTSSTGSPGTPGSGTASSSPGA |
| | SPGTSSTGSPGASPGTSSTGSPGASPGTSSTGSPGASPGTSSTGSPGTPGSGTASSSPGSSTPSGAT |
| | GSPGTPGSGTASSSPGSSTPSGATGSPGTPGSGTASSSPGSSTPSGATGSPGSSTPSGATGSPGSSPS |
| | ASTGTGPGSSPSASTGTGPGASPGTSSTGSPGTPGSGTASSSPGSSTPSGATGSPGSSPSASTGTGP |
| | GSSPSASTGTGPGASPGTSSTGSPGASPGTSSTGSPGSSTPSGATGSPGSSPSASTGTGPGASPGTS |
| | STGSPGSSPSASTGTGPGTPGSGTASSSPGSSTP |
| AG540A | TSSTGSPGASPGTSSTGSPGSSPSASTGTGPGTPGSGTASSSPGASPGTSSTGSPGASPGTSSTGSP |
| | GASPGTSSTGSPGSSTPSGATGSPGSSTPSGATGSPGASPGTSSTGSPGTPGSGTASSSPGSSTPSG |
| | ATGSPGSSTPSGATGSPGSSTPSGATGSPGSSPSASTGTGPGASPGTSSTGSPGASPGTSSTGSPGT |
| | PGSGTASSSPGASPGTSSTGSPGASPGTSSTGSPGASPGTSSTGSPGASPGTSSTGSPGTPGSGTAS |
| | SSPGSSTPSGATGSPGTPGSGTASSSPGSSTPSGATGSPGTPGSGTASSSPGSSTPSGATGSPGSSTP |
| | SGATGSPGSSPSASTGTGPGSSPSASTGTGPGASPGTSSTGSPGTPGSGTASSSPGSSTPSGATGSP |
| | GSSPSASTGTGPGSSPSASTGTGPGASPGTSSTGSPGASPGTSSTGSPGSSTPSGATGSPGSSPSAS |
| | TGTGPGASPGTSSTGSPGSSPSASTGTGPGTPGSGTASSSPGSSTPSGATGSPGSSTPSGATGSPGA |
| | SPG |
| AG576A | TSSTGSPGTPGSGTASSSPGASPGTSSTGSPGASPGTSSTGSPGASPGTSSTGSPGSSPSASTGTGP |
| | GTPGSGTASSSPGASPGTSSTGSPGASPGTSSTGSPGASPGTSSTGSPGSSTPSGATGSPGSSTPSG |
| | ATGSPGASPGTSSTGSPGTPGSGTASSSPGSSTPSGATGSPGSSTPSGATGSPGSSTPSGATGSPGS |
| | SPSASTGTGPGASPGTSSTGSPGASPGTSSTGSPGTPGSGTASSSPGASPGTSSTGSPGASPGTSST |
| | GSPGASPGTSSTGSPGASPGTSSTGSPGTPGSGTASSSPGSSTPSGATGSPGTPGSGTASSSPGSST |
| | PSGATGSPGTPGSGTASSSPGSSTPSGATGSPGSSTPSGATGSPGSSPSASTGTGPGSSPSASTGTG |
| | PGASPGTSSTGSPGTPGSGTASSSPGSSTPSGATGSPGSSPSASTGTGPGSSPSASTGTGPGASPGT |
| | SSTGSPGASPGTSSTGSPGSSTPSGATGSPGSSPSASTGTGPGASPGTSSTGSPGSSPSASTGTGPG |
| | TPGSGTASSSPGSSTPSGATGSPGSSTPSGATGSPGASPG |
| AG612A | STGSPGTPGSGTASSSPGSSTPSGATGSPGASPGTSSTGSPGTPGSGTASSSPGSSTPSGATGSPGS |
| | SPSASTGTGPGSSPSASTGTGPGSSTPSGATGSPGSSTPSGATGSPGASPGTSSTGSPGASPGTSST |
| | GSPGASPGTSSTGSPGTPGSGTASSSPGASPGTSSTGSPGASPGTSSTGSPGASPGTSSTGSPGSSPS |
| | ASTGTGPGTPGSGTASSSPGASPGTSSTGSPGASPGTSSTGSPGASPGTSSTGSPGSSTPSGATGSP |
| | GSSTPSGATGSPGASPGTSSTGSPGTPGSGTASSSPGSSTPSGATGSPGSSTPSGATGSPGSSTPSG |
| | ATGSPGSSPSASTGTGPGASPGTSSTGSPGASPGTSSTGSPGTPGSGTASSSPGASPGTSSTGSPGA |
| | SPGTSSTGSPGASPGTSSTGSPGASPGTSSTGSPGTPGSGTASSSPGSSTPSGATGSPGTPGSGTAS |
| | SSPGSSTPSGATGSPGTPGSGTASSSPGSSTPSGATGSPGSSTPSGATGSPGSSPSASTGTGPGSSPS |
| | ASTGTGPGASPGTSSTGSPGTPGSGTASSSPGSSTPSGATGSPGSSPSASTGTGPGSSPSASTGTGP |
| | GASPGTS |
| AG648A | GTASSSPGSSTPSGATGSPGSSPSASTGTGPGSSPSASTGTGPGSSTPSGATGSPGSSTPSGATGSP |
| | GASPGTSSTGSPGASPGTSSTGSPGASPGTSSTGSPGTPGSGTASSSPGASPGTSSTGSPGASPGTS |
| | STGSPGASPGTSSTGSPGSSPSASTGTGPGTPGSGTASSSPGASPGTSSTGSPGASPGTSSTGSPGA |
| | SPGTSSTGSPGSSTPSGATGSPGSSTPSGATGSPGASPGTSSTGSPGTPGSGTASSSPGSSTPSGAT |
| | GSPGSSTPSGATGSPGSSTPSGATGSPGSSPSASTGTGPGASPGTSSTGSPGASPGTSSTGSPGTPG |
| | SGTASSSPGASPGTSSTGSPGASPGTSSTGSPGASPGTSSTGSPGASPGTSSTGSPGTPGSGTASSS |
| | PGSSTPSGATGSPGTPGSGTASSSPGSSTPSGATGSPGTPGSGTASSSPGSSTPSGATGSPGSSTPS |
| | GATGSPGSSPSASTGTGPGSSPSASTGTGPGASPGTSSTGSPGTPGSGTASSSPGSSTPSGATGSPG |
| | SSPSASTGTGPGSSPSASTGTGPGASPGTSSTGSPGASPGTSSTGSPGSSTPSGATGSPGSSPSAST |
| | GTGPGASPGTSSTGSPGSSPSASTGTGPGTPGSGTASSSPGSSTP |
| AG684A | TSSTGSPGTPGSGTASSSPGSSTPSGATGSPGSSPSASTGTGPGSSPSASTGTGPGSSTPSGATGSP |
| | GSSTPSGATGSPGASPGTSSTGSPGASPGTSSTGSPGASPGTSSTGSPGTPGSGTASSSPGASPGTS |
| | STGSPGASPGTSSTGSPGASPGTSSTGSPGSSPSASTGTGPGTPGSGTASSSPGASPGTSSTGSPGA |
| | SPGTSSTGSPGASPGTSSTGSPGSSTPSGATGSPGSSTPSGATGSPGASPGTSSTGSPGTPGSGTAS |
| | SSPGSSTPSGATGSPGSSTPSGATGSPGSSTPSGATGSPGSSPSASTGTGPGASPGTSSTGSPGASP |
| | GTSSTGSPGTPGSGTASSSPGASPGTSSTGSPGASPGTSSTGSPGASPGTSSTGSPGASPGTSSTGS |
| | PGTPGSGTASSSPGSSTPSGATGSPGTPGSGTASSSPGSSTPSGATGSPGTPGSGTASSSPGSSTPS |
| | GATGSPGSSTPSGATGSPGSSPSASTGTGPGSSPSASTGTGPGASPGTSSTGSPGTPGSGTASSSPG |
| | SSTPSGATGSPGSSPSASTGTGPGSSPSASTGTGPGASPGTSSTGSPGASPGTSSTGSPGSSTPSGA |
| | TGSPGSSPSASTGTGPGASPGTSSTGSPGSSPSASTGTGPGTPGSGTASSSPGSSTPSGATGSPGSS |
| | TPSGATGSPGASPG |
| AG720A | TSSTGSPGTPGSGTASSSPGSSTPSGATGSPGASPGTSSTGSPGTPGSGTASSSPGSSTPSGATGSP |
| | GSSPSASTGTGPGSSPSASTGTGPGSSTPSGATGSPGSSTPSGATGSPGASPGTSSTGSPGASPGTS |
| | STGSPGASPGTSSTGSPGTPGSGTASSSPGASPGTSSTGSPGASPGTSSTGSPGASPGTSSTGSPGS |
| | SPSASTGTGPGTPGSGTASSSPGASPGTSSTGSPGASPGTSSTGSPGASPGTSSTGSPGSSTPSGAT |
| | GSPGSSTPSGATGSPGASPGTSSTGSPGTPGSGTASSSPGSSTPSGATGSPGSSTPSGATGSPGSST |
| | PSGATGSPGSSPSASTGTGPGASPGTSSTGSPGASPGTSSTGSPGTPGSGTASSSPGASPGTSSTGS |
| | PGASPGTSSTGSPGASPGTSSTGSPGASPGTSSTGSPGTPGSGTASSSPGSSTPSGATGSPGTPGSG |
| | TASSSPGSSTPSGATGSPGTPGSGTASSSPGSSTPSGATGSPGSSTPSGATGSPGSSPSASTGTGPG |
| | SSPSASTGTGPGASPGTSSTGSPGTPGSGTASSSPGSSTPSGATGSPGSSPSASTGTGPGSSPSAST |
| | GTGPGASPGTSSTGSPGASPGTSSTGSPGSSTPSGATGSPGSSPSASTGTGPGASPGTSSTGSPGSS |
| | PSASTGTGPGTPGSGTASSSPGSSTPSGATGSPGSSTPSGATGSPGASPG |
| AG756A | TSSTGSPGSSPSASTGTGPGSSPSASTGTGPGTPGSGTASSSPGSSTPSGATGSPGSSPSASTGTGP |
| | GASPGTSSTGSPGTPGSGTASSSPGSSTPSGATGSPGTPGSGTASSSPGASPGTSSTGSPGASPGTS |
| | STGSPGTPGSGTASSSPGSSTPSGATGSPGASPGTSSTGSPGTPGSGTASSSPGSSTPSGATGSPGS |
| | SPSASTGTGPGSSPSASTGTGPGSSTPSGATGSPGSSTPSGATGSPGASPGTSSTGSPGASPGTSST |
| | GSPGASPGTSSTGSPGTPGSGTASSSPGASPGTSSTGSPGASPGTSSTGSPGASPGTSSTGSPGSSPS |
| | ASTGTGPGTPGSGTASSSPGASPGTSSTGSPGASPGTSSTGSPGASPGTSSTGSPGSSTPSGATGSP |
| | GSSTPSGATGSPGASPGTSSTGSPGTPGSGTASSSPGSSTPSGATGSPGSSTPSGATGSPGSSTPSG |
| | ATGSPGSSPSASTGTGPGASPGTSSTGSPGASPGTSSTGSPGTPGSGTASSSPGASPGTSSTGSPGA |
| | SPGTSSTGSPGASPGTSSTGSPGASPGTSSTGSPGTPGSGTASSSPGSSTPSGATGSPGTPGSGTAS |
| | SSPGSSTPSGATGSPGTPGSGTASSSPGSSTPSGATGSPGSSTPSGATGSPGSSPSASTGTGPGSSPS |
| | ASTGTGPGASPGTSSTGSPGTPGSGTASSSPGSSTPSGATGSPGSSPSASTGTGPGSSPSASTGTGP |
| | GASPGTSSTGSPGASPG |
| AG792A | TSSTGSPGSSPSASTGTGPGSSPSASTGTGPGTPGSGTASSSPGSSTPSGATGSPGSSPSASTGTGP |
| | GASPGTSSTGSPGTPGSGTASSSPGSSTPSGATGSPGTPGSGTASSSPGASPGTSSTGSPGASPGTS |
| | STGSPGTPGSGTASSSPGSSTPSGATGSPGASPGTSSTGSPGTPGSGTASSSPGSSTPSGATGSPGS |
| | SPSASTGTGPGSSPSASTGTGPGSSTPSGATGSPGSSTPSGATGSPGASPGTSSTGSPGASPGTSST |
| | GSPGASPGTSSTGSPGTPGSGTASSSPGASPGTSSTGSPGASPGTSSTGSPGASPGTSSTGSPGSSPS |
| | ASTGTGPGTPGSGTASSSPGASPGTSSTGSPGASPGTSSTGSPGASPGTSSTGSPGSSTPSGATGSP |
| | GSSTPSGATGSPGASPGTSSTGSPGTPGSGTASSSPGSSTPSGATGSPGSSTPSGATGSPGSSTPSG |
| | ATGSPGSSPSASTGTGPGASPGTSSTGSPGASPGTSSTGSPGTPGSGTASSSPGASPGTSSTGSPGA |
| | SPGTSSTGSPGASPGTSSTGSPGASPGTSSTGSPGTPGSGTASSSPGSSTPSGATGSPGTPGSGTAS |
| | SSPGSSTPSGATGSPGTPGSGTASSSPGSSTPSGATGSPGSSTPSGATGSPGSSPSASTGTGPGSSPS |
| | ASTGTGPGASPGTSSTGSPGTPGSGTASSSPGSSTPSGATGSPGSSPSASTGTGPGSSPSASTGTGP |
| | GASPGTSSTGSPGASPGTSSTGSPGSSTPSGATGSPGSSPSASTGTGPGASPG |
| AG828A | TSSTGSPGSSPSASTGTGPGSSPSASTGTGPGTPGSGTASSSPGSSTPSGATGSPGSSPSASTGTGP |
| | GASPGTSSTGSPGTPGSGTASSSPGSSTPSGATGSPGTPGSGTASSSPGASPGTSSTGSPGASPGTS |
| | STGSPGTPGSGTASSSPGSSTPSGATGSPGASPGTSSTGSPGTPGSGTASSSPGSSTPSGATGSPGS |
| | SPSASTGTGPGSSPSASTGTGPGSSTPSGATGSPGSSTPSGATGSPGASPGTSSTGSPGASPGTSST |
| | GSPGASPGTSSTGSPGTPGSGTASSSPGASPGTSSTGSPGASPGTSSTGSPGASPGTSSTGSPGSSPS |
| | ASTGTGPGTPGSGTASSSPGASPGTSSTGSPGASPGTSSTGSPGASPGTSSTGSPGSSTPSGATGSP |
| | GSSTPSGATGSPGASPGTSSTGSPGTPGSGTASSSPGSSTPSGATGSPGSSTPSGATGSPGSSTPSG |
| | ATGSPGSSPSASTGTGPGASPGTSSTGSPGASPGTSSTGSPGTPGSGTASSSPGASPGTSSTGSPGA |
| | SPGTSSTGSPGASPGTSSTGSPGASPGTSSTGSPGTPGSGTASSSPGSSTPSGATGSPGTPGSGTAS |
| | SSPGSSTPSGATGSPGTPGSGTASSSPGSSTPSGATGSPGSSTPSGATGSPGSSPSASTGTGPGSSPS |
| | ASTGTGPGASPGTSSTGSPGTPGSGTASSSPGSSTPSGATGSPGSSPSASTGTGPGSSPSASTGTGP |
| | GASPGTSSTGSPGASPGTSSTGSPGSSTPSGATGSPGSSPSASTGTGPGASPGTSSTGSPGSSPSAS |
| | TGTGPGTPGSGTASSSPGSSTP |

[0249] In other embodiments, the CFXTEN composition comprises one or more non-repetitive XTEN sequences of about 36 to about 3000 amino acid residues, wherein at least about 80%, or at least about 90%, or about 91%, or about 92%, or about 93%, or about 94%, or about 95%, or about 96%, or about 97%, or about 98%, or about 99% to about 100% of the sequence consists of non-overlapping 36 amino acid sequence motifs selected from one or more of the polypeptide sequences of Tables 9-12, either as a family sequence, or where motifs are selected from two or more families of motifs.

[0250] In those embodiments wherein the XTEN component of the CFXTEN fusion protein has less than 100% of its amino acids consisting of 4, 5, or 6 types of amino acid selected from glycine (G), alanine (A), serine (S), threonine (T), glutamate (E) and proline (P), or less than 100% of the sequence consisting of the sequence motifs from Table 3 or the XTEN sequences of Tables 4, and 9-13 or less than 100% sequence identity compared with an XTEN from Tables 4, and 9-13, the other amino acid residues of the XTEN are selected from any of the other 14 natural L-amino acids, but are preferentially selected from hydrophilic amino acids such that the XTEN sequence contains at least about 90%, or at least about 91%, or at least about 92%, or at least about 93%, or at least about 94%, or at least about 95%, or at least about 96%, or at least about 97%, or at least about 98%, or at least about 99% hydrophilic amino acids. The XTEN amino acids that are not glycine (G), alanine (A), serine (S), threonine (T), glutamate (E) and proline (P) are either interspersed throughout the XTEN sequence, are located within or between the sequence motifs, or are concentrated in one or more short stretches of the XTEN sequence, e.g., to create a linker to the FVIII component. In such cases where the XTEN component of the CFXTEN comprises amino acids other than glycine (G), alanine (A), serine (S), threonine (T), glutamate (E) and proline (P), it is preferred that less than about 2% or less than about 1% of the amino acids be hydrophobic residues Without wishing to be bound by one particular theory, the resulting sequences generally lack a secondary structure, e.g., not having more than 2% alpha helices or 2% beta-sheets, as determined by the methods disclosed herein. Hydrophobic residues that are less favored in construction of XTEN include tryptophan, phenylalanine, tyrosine, leucine, isoleucine, valine, and methionine. Additionally, one can design the XTEN sequences to contain less than 5% or less than 4% or less than 3% or less than 2% or less than 1% or none of the following amino acids: cysteine (to avoid disulfide formation and oxidation), methionine (to avoid oxidation), asparagine and glutamine (to avoid desamidation). Thus, in some embodiments, the XTEN component of the CFXTEN fusion protein comprising other amino acids in addition to glycine (G), alanine (A), serine (S), threonine (T), glutamate (E) and proline (P) would have a sequence with less than 5% of the residues contributing to alpha-helices and beta-sheets as measured by the Chou-Fasman algorithm and have at least 90%, or at least about 95% or more random coil formation as measured by the GOR algorithm.

### 3. Length of Sequence

[0251] In another aspect, the invention provides XTEN of varying lengths for incorporation into CFXTEN compositions wherein the length of the XTEN sequence(s) are chosen based on the property or function to be achieved in the fusion protein. Depending on the intended property or function, the CFXTEN compositions comprise short or intermediate length XTEN located internal to the FVIII sequence or between FVIII domains and/or longer XTEN sequences that can serve as carriers, located in the fusion proteins as described herein. While not intended to be limiting, the XTEN or fragments of XTEN include short segments of about 6 to about 99 amino acid residues, intermediate lengths of about 100 to about 399 amino acid residues, and longer lengths of about 400 to about 3000 amino acid residues. Thus, the XTEN for incorporation into the subject CFXTEN encompass XTEN or fragments of XTEN with lengths of about 6, or about 12, or about 36, or about 40, or about 42, or about 72 or about 96, or about 144, or about 288, or about 400, or about 500, or about 576, or about 600, or about 700, or about 800, or about 864, or about 900, or about 1000, or about 1500, or about 2000, or about 2500, or up to about 3000 amino acid residues in length. Alternatively, the XTEN sequences can be about 6 to about 50, about 50 to about 100, about 100 to 150, about 150 to 250, about 250 to 400, about 400 to about 500, about 500 to about 900, about 900 to 1500, about 1500 to 2000, or about 2000 to about 3000 amino acid residues in length. The precise length of an XTEN can vary without adversely affecting the biological activity of a CFXTEN composition. In one embodiment, one or more of the XTEN used herein has 36 amino acids, 42 amino acids, 144 amino acids, 288 amino acids, 576 amino acids, or 864 amino acids in length. In another embodiment, one or more of the XTEN used herein is selected from the group consisting of XTEN_AE864, XTEN_AE576, XTEN_AE288, XTEN_AE144, XTEN_AE42, XTEN_AG864, XTEN_AG576, XTEN_AG288, XTEN_AG144, and XTEN_AG42. Non-limiting examples of XTEN sequences are presented in Table 4. In some embodiments, one or more of the XTEN used herein is selected from any one of the sequences in Table 4.

[0252] In particular CFXTEN configuration designs, where the XTEN serve as a flexible linker, or are inserted in external loops or unordered regions of the FVIII sequence to increase the bulk or hydrophilicity of the region, or are designed to interfere with clearance receptors for FVIII to enhance pharmacokinetic properties, or where a short or intermediate length of XTEN is used to facilitate tissue penetration or to vary the strength of interactions of the CFXTEN fusion protein with its target, or where it is desirable to distribute the cumulative length of XTEN in segments of short or intermediate length at multiple locations within the FVIII sequence, the invention contemplates CFXTEN compositions with one or more short or intermediate XTEN sequences inserted between one or more FVIII domains or within external loops, or at other sites in the FVIII sequence such as, but not limited to, locations at or proximal to the insertion sites identified in Table 5 or Table 25 or as illustrated in FIG. 7. In one embodiment of the foregoing, the CFXTEN fusion protein contains multiple XTEN segments, e.g., at least two, or at least three, or at least four, or at least five, or at least six or more XTEN segments in which the XTEN segments can be identical or they can be different. In other particular CFXTEN configuration designs, where the XTEN serves as a carrier to increase the bulk of the fusion protein, or to vary the strength of interactions of the CFXTEN fusion protein with its target, or to enhance the pharmacokinetic properties of the fusion protein, the invention contemplates CFXTEN compositions with one or more intermediate or longer length XTEN sequences inserted at the N- or C-termini, between one or more FVIII domains or within external loops, or at other sites in the FVIII sequence such as, but not limited to, locations at or proximal to the insertion sites identified in Table 5 or Table 25 or as illustrated in FIG. 7. The incorporation of longer XTEN into CFXTEN compositions confers enhanced properties on the fusion proteins, compared to fusion proteins with the same number of shorter length XTEN, including slower rates of systemic absorption and increased bioavailability after subcutaneous or intramuscular administration to a subject, and increased terminal half-life after parenteral administration. In the embodiments wherein the CFXTEN fusion proteins comprise multiple XTEN sequences, the cumulative length of the total residues in the XTEN sequences is greater than about 100 to about 1000, or about 200 to about 2000, or about 400 to about 3000 amino acid residues and the XTEN can be identical or they can be different in sequence, net charge, or in length. In one embodiment of CFXTEN comprising multiple XTEN, the individual XTEN sequences each exhibit at least about 80% sequence identity, or alternatively 81%, 82%, 83%, 84%, 85%, 86%, 87%, 88%, 89%, 90%, 91%, 92%, 93%, 94%, 95%, 96%, 97%, 98%, 99%, or 100% sequence identity compared to a motif or an XTEN selected from Tables 3, 4, and 9-13 or a fragment thereof, when optimally aligned with a sequence of comparable length.

[0253] As described more fully below, methods are disclosed in which the CFXTEN are designed by selecting the length of the XTEN and its site of incorporation within the CFXTEN to confer a target half-life or other physicochemical property of a CFXTEN fusion protein, and then are incorporated into the FVIII to create the CFXTEN fusion protein compositions. In general, XTEN cumulative lengths longer that about 400 residues incorporated into the CFXTEN compositions result in longer half-life compared to shorter cumulative lengths, e.g., shorter than about 280 residues. In one embodiment, CFXTEN fusion proteins designs are contemplated that comprise a single XTEN as a carrier, with a long sequence length of at least about 400, or at least about 600, or at least about 800, or at least about 900, or at least about 1000 or more amino acids. In another embodiment, multiple XTEN are incorporated into the fusion protein to achieve cumulative lengths of at least about 400, or at least about 600, or at least about 800, or at least about 900, or at least about 1000 or more amino acids, wherein the XTEN can be identical or they can be different in sequence or length. As used herein, “cumulative length” is intended to encompass the total length, in amino acid residues, when more than one XTEN is incorporated into the CFXTEN fusion protein. Both of the foregoing embodiments are designed to confer increased bioavailability and/or increased terminal half-life after administration to a subject compared to CFXTEN comprising shorter cumulative XTEN lengths. When administered subcutaneously or intramuscularly, the Cₘₐₓ is reduced but the area under the curve (AUC) is increased in comparison to a comparable dose of a CFXTEN with shorter cumulative length XTEN or FVIII not linked to XTEN, thereby contributing to the ability to maintain effective levels of the CFXTEN composition for a longer period of time and permitting increased periods between dosing, as described more fully below. Thus, the XTEN confers the property of a depot to the administered CFXTEN, in addition to the other physicochemical properties described herein.

[0254] When XTEN are used as a carrier, the invention takes advantage of the discovery that increasing the length of the non-repetitive, unstructured polypeptides enhances the unstructured nature of the XTENs and correspondingly enhances the physical/chemical and pharmacokinetic properties of fusion proteins comprising the XTEN carrier. As described more fully in the Examples, proportional increases in the length of the XTEN, even if created by a repeated order of single family sequence motifs (e.g., the four AE motifs of Table 3), result in a sequence with a higher percentage of random coil formation, as determined by GOR algorithm, or reduced content of alpha-helices or beta-sheets, as determined by Chou-Fasman algorithm, compared to shorter XTEN lengths. In addition, increasing the length of the unstructured polypeptide fusion partner, as described in the Examples, results in a fusion protein with a disproportionate increase in terminal half-life compared to fusion proteins with unstructured polypeptide partners with shorter sequence lengths. The enhanced pharmacokinetic properties of the CFXTEN in comparison to FVIII not linked to XTEN are described more fully, below.

[0255] In another aspect, the invention provides methods to create XTEN of short or intermediate lengths from longer “donor” XTEN sequences, wherein the longer donor sequence is created by truncating at the N-terminus, or the C-terminus, or a fragment is created from the interior of a donor sequence, thereby resulting in a short or intermediate length XTEN. In non-limiting examples, as schematically depicted in FIG. 14A-C, the AG864 sequence of 864 amino acid residues can be truncated to yield an AG144 with 144 residues, an AG288 with 288 residues, an AG576 with 576 residues, or other intermediate lengths, while the AE864 sequence (as depicted in FIG. 14D, E) can be truncated to yield an AE288 or AE576 or other intermediate lengths. It is specifically contemplated that such an approach can be utilized with any of the XTEN embodiments described herein or with any of the sequences listed in Tables 4 or 9-13 to result in XTEN of a desired length.

### 4. Net Charge

[0256] In other embodiments, the unstructured characteristic of an XTEN polypeptide can be enhanced by incorporation of amino acid residues with a net charge and/or reduction of the overall percentage (e.g. less than 5%, or 4%, or 3%, or 2%, or 1%) of hydrophobic amino acids in the XTEN sequence. The overall net charge and net charge density is controlled by modifying the content of charged amino acids in the XTEN sequences, either positive or negative, with the net charge typically represented as the percentage of amino acids in the polypeptide contributing to a charged state beyond those residues that are cancelled by a residue with an opposite charge. In some embodiments, the net charge density of the XTEN of the compositions may be above +0.1 or below −0.1 charges/residue. By “net charge density” of a protein or peptide herein is meant the net charge divided by the total number of amino acids in the protein or propeptide. In other embodiments, the net charge of an XTEN can be about 0%, about 1%, about 2%, about 3%, about 4%, about 5%, about 6%, about 7%, about 8%, about 9%, about 10% about 11%, about 12%, about 13%, about 14%, about 15%, about 16%, about 17%, about 18%, about 19%, or about 20% or more. Based on the net charge, some XTENs have an isoelectric point (pI) of 1.0, 1.5, 2.0, 2.5, 3.0, 3.5, 4.0, 4.5, 5.0, 5.5, 6.0, or even 6.5. In preferred embodiments, the XTEN will have an isoelectric point between 1.5 and 4.5 and carry a net negative charge under physiologic conditions.

[0257] Since most tissues and surfaces in a human or animal have a net negative charge, in some embodiments the XTEN sequences are designed to have a net negative charge to minimize non-specific interactions between the XTEN containing compositions and various surfaces such as blood vessels, healthy tissues, or various receptors. Not to be bound by a particular theory, an XTEN can adopt open conformations due to electrostatic repulsion between individual amino acids of the XTEN polypeptide that individually carry a net negative charge and that are distributed across the sequence of the XTEN polypeptide. In some embodiments, the XTEN sequence is designed with at least 90% or 95% of the charged residues separated by other residues such as serine, alanine, threonine, proline or glycine, which leads to a more uniform distribution of charge, better expression or purification behavior. Such a distribution of net negative charge in the extended sequence lengths of XTEN can lead to an unstructured conformation that, in turn, can result in an effective increase in hydrodynamic radius. In preferred embodiments, the negative charge of the subject XTEN is conferred by incorporation of glutamic acid residues. Generally, the glutamic residues are spaced uniformly across the XTEN sequence. In some cases, the XTEN can contain about 10-80, or about 15-60, or about 20-50 glutamic residues per 20 kDa of XTEN that can result in an XTEN with charged residues that would have very similar pKa, which can increase the charge homogeneity of the product and sharpen its isoelectric point, enhance the physicochemical properties of the resulting CFXTEN fusion protein for, and hence, simplifying purification procedures. For example, where an XTEN with a negative charge is desired, the XTEN can be selected solely from an AE family sequence, which has approximately a 17% net charge due to incorporated glutamic acid, or can include varying proportions of glutamic acid-containing motifs of Table 3 to provide the desired degree of net charge. Non-limiting examples of AE XTEN include, but are not limited to the AE36, AE42, AE48, AE144, AE288, AE576, AE624, AE864, and AE912 polypeptide sequences of Tables 4 and 10 or fragments thereof. In one embodiment, an XTEN sequence of Tables 4, or 9-12 can be modified to include additional glutamic acid residues to achieve the desired net negative charge. Accordingly, in one embodiment the invention provides XTEN in which the XTEN sequences contain about 1%, 2%, 4%, 8%, 10%, 15%, 17%, 20%, 25%, or even about 30% glutamic acid. In one embodiment, the invention contemplates incorporation of up to 5% aspartic acid residues into XTEN in addition to glutamic acid in order to achieve a net negative charge.

[0258] In other embodiments, where no net charge is desired, the XTEN can be selected from, for example, AG XTEN components, such as the AG motifs of Table 3, or those AM motifs of Table 3 that have no net charge. Non-limiting examples of AG XTEN include, but are not limited to AG42, AG144, AG288, AG576, and AG864 polypeptide sequences of Tables 4 and 12, or fragments thereof. In another embodiment, the XTEN can comprise varying proportions of AE and AG motifs (in order to have a net charge that is deemed optimal for a given use or to maintain a given physicochemical property.

[0259] Not to be bound by a particular theory, the XTEN of the CFXTEN compositions with the higher net charge are expected to have less non-specific interactions with various negatively-charged surfaces such as blood vessels, tissues, or various receptors, which would further contribute to reduced active clearance. Conversely, it is believed that the XTEN of the CFXTEN compositions with a low (or no) net charge would have a higher degree of interaction with surfaces that can potentiate the activity of the associated coagulation factor, given the known contribution of cell (e.g., platelets) and vascular surfaces to the coagulation process and the intensity of activation of coagulation factors (Zhou, R., et al., Biomaterials (2005) 26(16):2965-2973; London, F., et al. Biochemistry (2000) 39(32):9850-9858).

[0260] The XTEN of the compositions of the present invention generally have no or a low content of positively charged amino acids. In some embodiments, the XTEN may have less than about 10% amino acid residues with a positive charge, or less than about 7%, or less than about 5%, or less than about 2%, or less than about 1% amino acid residues with a positive charge. However, the invention contemplates constructs where a limited number of amino acids with a positive charge, such as lysine, are incorporated into XTEN to permit conjugation between the epsilon amine of the lysine and a reactive group on a peptide, a linker bridge, or a reactive group on a drug or small molecule to be conjugated to the XTEN backbone. In one embodiment of the foregoing, the XTEN of the subject CFXTEN has between about 1 to about 100 lysine residues, or about 1 to about 70 lysine residues, or about 1 to about 50 lysine residues, or about 1 to about 30 lysine residues, or about 1 to about 20 lysine residues, or about 1 to about 10 lysine residues, or about 1 to about 5 lysine residues, or alternatively only a single lysine residue. Using the foregoing lysine-containing XTEN, fusion proteins can be constructed that comprise XTEN, a FVIII coagulation factor, plus a chemotherapeutic agent useful in the treatment of coagulopathy diseases or disorders, wherein the maximum number of molecules of the agent incorporated into the XTEN component is determined by the numbers of lysines or other amino acids with reactive side chains (e.g., cysteine) incorporated into the XTEN.

[0261] As hydrophobic amino acids impart structure to a polypeptide, the invention provides that the content of hydrophobic amino acids in the XTEN will typically be less than 5%, or less than 2%, or less than 1% hydrophobic amino acid content. In one embodiment, the amino acid content of methionine and tryptophan in the XTEN component of a CFXTEN fusion protein is typically less than 5%, or less than 2%, and most preferably less than 1%. In another embodiment, the XTEN will have a sequence that has less than 10% amino acid residues with a positive charge, or less than about 7%, or less that about 5%, or less than about 2% amino acid residues with a positive charge, the sum of methionine and tryptophan residues will be less than 2%, and the sum of asparagine and glutamine residues will be less than 5% of the total XTEN sequence.

### 5. Low Immunogenicity

[0262] In another aspect, the XTEN sequences provided herein have a low degree of immunogenicity or are substantially non-immunogenic. Several factors can contribute to the low immunogenicity of XTEN, e.g., the non-repetitive sequence, the unstructured conformation, the high degree of solubility, the low degree or lack of self-aggregation, the low degree or lack of proteolytic sites within the sequence, and the low degree or lack of epitopes in the XTEN sequence.

[0263] Conformational epitopes are formed by regions of the protein surface that are composed of multiple discontinuous amino acid sequences of the protein antigen. The precise folding of the protein brings these sequences into a well-defined, stable spatial configurations, or epitopes, that can be recognized as “foreign” by the host humoral immune system, resulting in the production of antibodies to the protein or the activation of a cell-mediated immune response. In the latter case, the immune response to a protein in an individual is heavily influenced by T-cell epitope recognition that is a function of the peptide binding specificity of that individual's HLA-DR allotype. Engagement of a MHC Class II peptide complex by a cognate T-cell receptor on the surface of the T-cell, together with the cross-binding of certain other co-receptors such as the CD4 molecule, can induce an activated state within the T-cell. Activation leads to the release of cytokines further activating other lymphocytes such as B cells to produce antibodies or activating T killer cells as a full cellular immune response.

[0264] The ability of a peptide to bind a given MHC Class II molecule for presentation on the surface of an APC (antigen presenting cell) is dependent on a number of factors; most notably its primary sequence. In one embodiment, a lower degree of immunogenicity is achieved by designing XTEN sequences that resist antigen processing in antigen presenting cells, and/or choosing sequences that do not bind MHC receptors well. The invention provides CFXTEN fusion proteins with substantially non-repetitive XTEN polypeptides designed to reduce binding with MHC II receptors, as well as avoiding formation of epitopes for T-cell receptor or antibody binding, resulting in a low degree of immunogenicity. Avoidance of immunogenicity can attribute to, at least in part, a result of the conformational flexibility of XTEN sequences; i.e., the lack of secondary structure due to the selection and order of amino acid residues. For example, of particular interest are sequences having a low tendency to adapt compactly folded conformations in aqueous solution or under physiologic conditions that could result in conformational epitopes. The administration of fusion proteins comprising XTEN, using conventional therapeutic practices and dosing, would generally not result in the formation of neutralizing antibodies to the XTEN sequence, and also reduce the immunogenicity of the FVIII fusion partner in the CFXTEN compositions.

[0265] In one embodiment, the XTEN sequences utilized in the subject fusion proteins can be substantially free of epitopes recognized by human T cells. The elimination of such epitopes for the purpose of generating less immunogenic proteins has been disclosed previously; see for example WO 98/52976, WO 02/079232, and WO 00/3317 which are incorporated by reference herein. Assays for human T cell epitopes have been described (Stickler, M., et al. (2003) J Immunol Methods, 281: 95-108). Of particular interest are peptide sequences that can be oligomerized without generating T cell epitopes or non-human sequences. This is achieved by testing direct repeats of these sequences for the presence of T-cell epitopes and for the occurrence of 6 to 15-mer and, in particular, 9-mer sequences that are not human, and then altering the design of the XTEN sequence to eliminate or disrupt the epitope sequence. In some embodiments, the XTEN sequences are substantially non-immunogenic by the restriction of the numbers of epitopes of the XTEN predicted to bind MHC receptors. With a reduction in the numbers of epitopes capable of binding to MHC receptors, there is a concomitant reduction in the potential for T cell activation as well as T cell helper function, reduced B cell activation or upregulation and reduced antibody production. The low degree of predicted T-cell epitopes can be determined by epitope prediction algorithms such as, e.g., TEPITOPE (Sturniolo, T., et al. (1999) Nat Biotechnol, 17: 555-61), as shown in Example 33. The TEPITOPE score of a given peptide frame within a protein is the log of the K_{d} (dissociation constant, affinity, off-rate) of the binding of that peptide frame to multiple of the most common human MHC alleles, as disclosed in Sturniolo, T. et al. (1999) Nature Biotechnology 17:555). The score ranges over at least 20 logs, from about 10 to about −10 (corresponding to binding constraints of 10e¹⁰ K_{d} to 10e⁻¹⁰ K_{d}), and can be reduced by avoiding hydrophobic amino acids that serve as anchor residues during peptide display on MHC, such as M, I, L, V, F. In some embodiments, an XTEN component incorporated into a CFXTEN does not have a predicted T-cell epitope at a TEPITOPE threshold score of about −5, or −6, or −7, or −8, or −9, or at a TEPITOPE score of −10. As used herein, a score of “−9” is a more stringent TEPITOPE threshold than a score of −5.

[0266] In another embodiment, the inventive XTEN sequences, including those incorporated into the subject CFXTEN fusion proteins, are rendered substantially non-immunogenic by the restriction of known proteolytic sites from the sequence of the XTEN, reducing the processing of XTEN into small peptides that can bind to MHC II receptors. In another embodiment, the XTEN sequence is rendered substantially non-immunogenic by the use a sequence that is substantially devoid of secondary structure, conferring resistance to many proteases due to the high entropy of the structure. Accordingly, the reduced TEPITOPE score and elimination of known proteolytic sites from the XTEN render the XTEN compositions, including the XTEN of the CFXTEN fusion protein compositions, substantially unable to be bound by mammalian receptors, including those of the immune system. In one embodiment, an XTEN of a CFXTEN fusion protein can have >100 nM K_{d} binding to a mammalian receptor, or greater than 500 nM K_{d}, or greater than 1 μM K_{d} towards a mammalian cell surface or circulating polypeptide receptor.

[0267] Additionally, the non-repetitive sequence and corresponding lack of epitopes of XTEN limit the ability of B cells to bind to or be activated by XTEN. A repetitive sequence is recognized and can form multivalent contacts with even a few B cells and, as a consequence of the cross-linking of multiple T-cell independent receptors, can stimulate B cell proliferation and antibody production. In contrast, while an XTEN can make contacts with many different B cells over its extended sequence, each individual B cell may only make one or a small number of contacts with an individual XTEN due to the lack of repetitiveness of the sequence. Not being to be bound by any theory, XTENs typically have a much lower tendency to stimulate proliferation of B cells and thus an immune response. In one embodiment, the CFXTEN have reduced immunogenicity as compared to the corresponding FVIII that is not fused to an XTEN. In one embodiment, the administration of up to three parenteral doses of a CFXTEN to a mammal result in detectable anti-CFXTEN IgG at a serum dilution of 1:100 but not at a dilution of 1:1000. In another embodiment, the administration of up to three parenteral doses of a CFXTEN to a mammal result in detectable anti-FVIII IgG at a serum dilution of 1:100 but not at a dilution of 1:1000. In another embodiment, the administration of up to three parenteral doses of a CFXTEN to a mammal result in detectable anti-XTEN IgG at a serum dilution of 1:100 but not at a dilution of 1:1000. In the foregoing embodiments, the mammal can be a mouse, a rat, a rabbit, or a cynomolgus monkey.

[0268] An additional feature of XTENs with non-repetitive sequences relative to sequences with a high degree of repetitiveness is non-repetitive XTENs form weaker contacts with antibodies. Antibodies are multivalent molecules. For instance, IgGs have two identical binding sites and IgMs contain 10 identical binding sites. Thus antibodies against repetitive sequences can form multivalent contacts with such repetitive sequences with high avidity, which can affect the potency and/or elimination of such repetitive sequences. In contrast, antibodies against non-repetitive XTENs may yield monovalent interactions, resulting in less likelihood of immune clearance such that the CFXTEN compositions can remain in circulation for an increased period of time. The exemplary sequences including those listed in Tables 4, 9, 10, 11, 12, and 13, or other parts of the application embodying the aforementioned feature. Increased hydrodynamic radius.

[0269] In another aspect, a subject XTEN useful as a fusion partner has a high hydrodynamic radius that confers a corresponding increased apparent molecular weight to the CFXTEN fusion protein incorporating the XTEN. As detailed in Example 27, the linking of XTEN to therapeutic protein sequences results in CFXTEN compositions that can have increased hydrodynamic radii, increased apparent molecular weight, and increased apparent molecular weight factor compared to a therapeutic protein not linked to an XTEN. For example, in therapeutic applications in which prolonged half-life is desired, compositions in which an XTEN with a high hydrodynamic radius is incorporated into a fusion protein comprising a therapeutic protein can effectively enlarge the hydrodynamic radius of the composition beyond the glomerular pore size of approximately 3-5 nm (corresponding to an apparent molecular weight of about 70 kDa) (Caliceti. 2003. Pharmacokinetic and biodistribution properties of poly(ethylene glycol)-protein conjugates. Adv Drug Deliv Rev 55:1261-1277), resulting in reduced renal clearance of circulating proteins with a corresponding increase in terminal half-life and other enhanced pharmacokinetic properties. The hydrodynamic radius of a protein is determined by its molecular weight as well as by its structure, including shape or compactness. Not to be bound by a particular theory, the XTEN can adopt open conformations due to electrostatic repulsion between individual charges of the peptide or the inherent flexibility imparted by the particular amino acids in the sequence that lack potential to confer secondary structure. The open, extended and unstructured conformation of the XTEN polypeptide can have a greater proportional hydrodynamic radius compared to polypeptides of a comparable sequence length and/or molecular weight that have secondary and/or tertiary structure, such as typical globular proteins. Methods for determining the hydrodynamic radius are well known in the art, such as by the use of size exclusion chromatography (SEC), as described in U.S. Pat. Nos. 6,406,632 and 7,294,513. Example 27 demonstrates that increases in XTEN length result in proportional increase in the hydrodynamic radius, apparent molecular weight, and/or apparent molecular weight factor, and thus permit the tailoring of CFXTEN to desired cut-off values of apparent molecular weights or hydrodynamic radii. Accordingly, in certain embodiments, the CFXTEN fusion protein can be configured with an XTEN such that the fusion protein can have a hydrodynamic radius of at least about 5 nm, or at least about 8 nm, or at least about 10 nm, or 12 nm, or at least about 15 nm. In the foregoing embodiments, the large hydrodynamic radius conferred by the XTEN in a CFXTEN fusion protein can lead to reduced renal clearance of the resulting fusion protein, leading to a corresponding increase in terminal half-life, an increase in mean residence time, and/or a decrease in renal clearance rate.

[0270] Generally, the actual molecular weight of the FVIII component of the CFXTEN fusion protein is about 165-170 kDa. In the case of a FVIII BDD, it is about 265 kDa for the mature form of full-length FVIII, while the actual molecular weight of a CFXTEN fusion protein for a FVIII BDD plus a single or multiple XTEN ranges from about 200 to about 270 kDa, depending on the length of the XTEN component. When the molecular weights of the CFXTEN fusion proteins are derived from size exclusion chromatography analyses, the open conformation of the XTEN due to the low degree of secondary structure results in an increase in the apparent molecular weight of the fusion proteins. In some embodiments, the CFXTEN comprising a FVIII and at least one or multiple XTEN exhibits an apparent molecular weight of at least about 400 kD, or at least about 500 kD, or at least about 700 kD, or at least about 1000 kD, or at least about 1400 kD, or at least about 1600 kD, or at least about 1800 kD, or at least about 2000 kD. Accordingly, the CFXTEN fusion proteins comprising one or more XTEN exhibit an apparent molecular weight that is about 1.3-fold greater, or about 2-fold greater, or about 3-fold greater or about 4-fold greater, or about 8-fold greater, or about 10-fold greater, or about 12-fold greater, or about 15-fold greater than the actual molecular weight of the fusion protein. In one embodiment, the isolated CFXTEN fusion protein of any of the embodiments disclosed herein exhibit an apparent molecular weight factor under physiologic conditions that is greater than about 1.3, or about 2, or about 3, or about 4, or about 5, or about 6, or about 7, or about 8, or about 10, or greater than about 15. In another embodiment, the CFXTEN fusion protein has, under physiologic conditions, an apparent molecular weight factor that is about 3 to about 20, or is about 5 to about 15, or is about 8 to about 12, or is about 9 to about 10 relative to the actual molecular weight of the fusion protein. It is believed that the increased apparent molecular weight of the subject CFXTEN compositions enhances the pharmacokinetic properties of the fusion proteins by a combination of factors, which include reduced glomerular filtration, reduced active clearance, and reduced loss in capillary and venous bleeding.

### IV). CFXTEN Compositions

[0271] The present invention provides compositions comprising fusion proteins having factor VIII linked to one or more XTEN sequences, wherein the fusion protein acts to replace or augment the amount of existing FVIII in the intrinsic or contact activated coagulation pathway when administered into a subject. The invention addresses a long-felt need in increasing the terminal half-life of exogenously administered factor VIII to a subject in need thereof. One way to increase the circulation half-life of a therapeutic protein is to ensure that renal clearance or metabolism of the protein is reduced. Another way to increase the terminal half-life is to reduce the active clearance of the therapeutic protein, whether mediated by receptors, active metabolism of the protein, or other endogenous mechanisms. Both may be achieved by conjugating the protein to a polymer, which, on one hand, is capable of conferring an increased molecular size (or hydrodynamic radius) to the protein and, hence, reduced renal clearance, and, on the other hand, interferes with binding of the protein to clearance receptors or other proteins that contribute to metabolism or clearance. Thus, certain objects of the present invention include, but are not limited to, providing improved FVIII molecules with a longer circulation or terminal half-life, decreasing the number or frequency of necessary administrations of FVIII compositions, retaining at least a portion of the activity compared to native coagulation factor VIII, and/or enhancing the ability to treat coagulation deficiencies and uncontrolled bleedings more efficiently, more effectively, more economically, and/or with greater safety compared to presently available factor VIII preparations.

[0272] Accordingly, the present invention provides isolated fusion protein compositions comprising an FVIII covalently linked to one or more extended recombinant polypeptides (“XTEN”), resulting in a CFXTEN fusion protein composition. The term “CFXTEN”, as used herein, is meant to encompass fusion polypeptides that comprise one or more payload regions comprising a FVIII or a portion of a FVIII that is capable of procoagulant activity associated with a FVIII coagulation factor and at least one other region comprising at least a first XTEN polypeptide. In one embodiment, the FVIII is native FVIII. In another embodiment, the FVIII is a sequence variant, fragment, homolog, or mimetic of a natural sequence that retains at least a portion of the procoagulant activity of native FVIII, as disclosed herein. Non-limiting examples of FVIII suitable for inclusion in the compositions include the sequences of Table 1 and Table 31 or sequences having at least 80%, or at least 90%, or at least 91%, or at least 92%, or at least 93%, or at least 94%, or at least 95%, or at least 96%, or at least 97%, or at least 98%, or at least 99% sequence identity to a sequence of Table 1 or Table 31. In a preferred embodiment, the FVIII is a B-domain deleted (BDD) FVIII sequence variant, such as those BDD sequences from Table 1, Table 31 or other such sequences known in the art.

[0273] The compositions of the invention include fusion proteins that are useful, when administered to a subject in need thereof, for mediating or preventing or ameliorating a disease, disorder or condition associated with factor VIII deficiencies or defects in endogenously produced FVIII, or bleeding disorders associated with trauma, surgery, factor VIII deficiencies or defects. Of particular interest are CFXTEN fusion protein compositions for which an increase in a pharmacokinetic parameter, increased solubility, increased stability, or some other enhanced pharmaceutical property compared to native FVIII is sought, or for which increasing the terminal half-life would improve efficacy, safety, or result in reduced dosing frequency and/or improve patient management. The CFXTEN fusion proteins of the embodiments disclosed herein exhibit one or more or any combination of the improved properties and/or the embodiments as detailed herein. In some embodiments, the CFXTEN fusion composition remains at a level above a threshold value of at least 0.01-0.05, or 0.05 to 0.1, or 0.1 to 0.4 IU/ml when administered to a subject, for a longer period of time when compared to a FVIII not linked to XTEN.

[0274] The FVIII of the subject compositions, particularly those disclosed in Table 1, together with their corresponding nucleic acid and amino acid sequences, are available in public databases such as Chemical Abstracts Services Databases (e.g., the CAS Registry), GenBank, The Universal Protein Resource (UniProt) and subscription provided databases such as GenSeq (e.g., Derwent). Polynucleotide sequences applicable for expressing the subject CFXTEN sequences may be a wild type polynucleotide sequence encoding a given FVIII (e.g., either full length or mature), or in some instances the sequence may be a variant of the wild type polynucleotide sequence (e.g., a polynucleotide which encodes the wild type biologically active protein, wherein the DNA sequence of the polynucleotide has been optimized, for example, for expression in a particular species, or a polynucleotide encoding a variant of the wild type protein, such as a site directed mutant or an allelic variant. It is well within the ability of the skilled artisan to use a wild-type or consensus cDNA sequence or a codon-optimized variant of a FVIII to create CFXTEN constructs contemplated by the invention using methods known in the art and/or in conjunction with the guidance and methods provided herein, and described more fully in the Examples.

[0275] In one embodiment, a CFXTEN fusion protein comprises a single FVIII molecule linked to a single XTEN (e.g., an XTEN as described above) including, but limited to sequences AE42, AG42, AE288, AG288, AE864, and AG864 shown in Table 4. In another embodiment, the CFXTEN comprises a single FVIII linked to two XTEN, wherein the XTEN may be identical or they may be different. In another embodiment, the CFXTEN fusion protein comprises a single FVIII molecule linked to one, two, three, four, five or more XTEN sequences, in which the FVIII is a sequence that has at least about 80% sequence identity, or alternatively 81%, 82%, 83%, 84%, 85%, 86%, 87%, 88%, 89%, 90%, 91%, 92%, 93%, 94%, 95%, 96%, 97%, 98%, or at least about 99%, or 100% sequence identity compared to a protein sequence selected from Table 1, when optimally aligned, and the one or more XTEN are each having at least about 80% sequence identity, or alternatively 81%, 82%, 83%, 84%, 85%, 86%, 87%, 88%, 89%, 90%, 91%, 92%, 93%, 94%, 95%, 96%, 97%, 98%, or at least about 99%, or 100% sequence identity compared to one or more sequences selected from any one of Tables 3, 4, and 9-13, when optimally aligned. In yet another embodiment, the CFXTEN fusion protein comprises a single FVIII that has portions of its sequence exhibiting at least about 80% sequence identity, or alternatively 81%, 82%, 83%, 84%, 85%, 86%, 87%, 88%, 89%, 90%, 91%, 92%, 93%, 94%, 95%, 96%, 97%, 98%, or at least about 99%, or 100% sequence identity compared to sequences of comparable length selected from Table 1, when optimally aligned, with the portions interspersed with and linked by three or more XTEN sequences that each has at least about 80% sequence identity, or alternatively 81%, 82%, 83%, 84%, 85%, 86%, 87%, 88%, 89%, 90%, 91%, 92%, 93%, 94%, 95%, 96%, 97%, 98%, or at least about 99%, or 100% sequence identity compared to sequences selected from any one of Tables 3, 4, and 9-13, or fragments thereof, when optimally aligned. In yet another embodiment, the CFXTEN fusion protein comprises a sequence with at least about 80% sequence identity, or alternatively 81%, 82%, 83%, 84%, 85%, 86%, 87%, 88%, 89%, 90%, 91%, 92%, 93%, 94%, 95%, 96%, 97%, 98%, or at least about 99%, or 100% sequence identity to a sequence from any one of Tables 14 and 28-30, when optimally aligned.

[0276] 1. CFXTEN Fusion Protein Configurations

[0277] The invention provides CFXTEN fusion protein compositions with the CF and XTEN components linked in specific N- to C-terminus configurations.

[0278] In one embodiment of the CFXTEN composition, the invention provides a fusion protein of formula I:

(XTEN)ₓ-CF-(XTEN)_{y} I

wherein independently for each occurrence, CF is a factor VIII as defined herein, including sequences of Table 1 and Table 31 (e.g., native mature FVIII, FVIII BDD-2, and FVIII BDD-9); x is either 0 or 1 and y is either 0 or 1 wherein x+y≧1; and XTEN is an extended recombinant polypeptide as described herein, including, but not limited to AE42, AG42, AE288, AG288, AE864, and AG864. Accordingly, the CFXTEN fusion composition can have XTEN-CF, XTEN-CF-XTEN, or CF-XTEN configurations.

[0279] In another embodiment of the CFXTEN composition, the invention provides a fusion protein of formula II:

(XTEN)ₓ-(S)ₓ-(CF)-(XTEN)_{y} II

wherein independently for each occurrence, CF is a factor VIII as defined herein, including sequences of Table 1 and Table 31 (e.g., native mature FVIII, FVIII BDD-2, and FVIII BDD-9); S is a spacer sequence having between 1 to about 50 amino acid residues that can optionally include a cleavage sequence or amino acids compatible with restrictions sites; x is either 0 or 1 and y is either 0 or 1 wherein x+y≧1; and XTEN is an extended recombinant polypeptide as described herein including, but not limited to AE42, AG42, AE288, AG288, AE864, and AG864.

[0280] In another embodiment of the CFXTEN composition, the invention provides an isolated fusion protein, wherein the fusion protein is of formula III:

(XTEN)ₓ-(S)ₓ-(CF)-(S)_{y}-(XTEN)_{y} III

wherein independently for each occurrence, CF is a factor VIII as defined herein, including sequences of Table 1 and Table 31 (e.g., native mature FVIII, FVIII BDD-2, and FVIII BDD-9); S is a spacer sequence having between 1 to about 50 amino acid residues that can optionally include a cleavage sequence or amino acids compatible with restrictions sites; x is either 0 or 1 and y is either 0 or 1 wherein x+y≧1; and XTEN is an extended recombinant polypeptide as described herein including, but not limited to AE42, AG42, AE288, AG288, AE864, and AG864.

[0281] In another embodiment of the CFXTEN composition, the invention provides an isolated fusion protein of formula IV:

(A1)-(XTEN)ᵤ-(A2)-(XTEN)ᵥ-(B)-(XTEN)_{w}-(A3)-(XTEN)ₓ-(C1)-(XTEN)_{y}-(C2) IV

wherein independently for each occurrence, A1 is an A1 domain of FVIII; A2 is an A2 domain of FVIII; A3 is an A3 domain of FVIII; B is a B domain of FVIII which can be a fragment or a splice variant of the B domain; C1 is a C1 domain of FVIII; C2 is a C2 domain of FVIII; v is either 0 or 1; w is either 0 or 1; x is either 0 or 1; y is either 0 or 1 with the proviso that u+v+x+y≧1; and XTEN is an extended recombinant polypeptide as described herein including, but not limited to AE42, AG42, AE288, AG288, AE864, and AG864.

[0282] In another embodiment of the CFXTEN composition, the invention provides an isolated fusion protein of formula V:

(XTEN)ₜ-(S)ₐ-(A1)-(S)_{b}-(XTEN)ᵤ-(S)_{b}-(A2)-(S)_{c}-(XTEN)ᵥ-(S)_{c}-(B)-(S)_{d}-(XTEN)_{w}-(S)_{d}-(A3)-(S)ₑ-(XTEN)ₓ-(S)ₑ-(C1)-(S)_{f}-(XTEN)_{y}-(S)_{f}-(C2)-(S)_{g}-(XTEN)_{z} V

wherein independently for each occurrence, A1 is an A1 domain of FVIII; A2 is an A2 domain of FVIII; A3 is an A3 domain of FVIII; B is a B domain of FVIII which can be a fragment or a splice variant of the B domain; C1 is a C1 domain of FVIII; C2 is a C2 domain of FVIII; S is a spacer sequence having between 1 to about 50 amino acid residues that can optionally include a cleavage sequence or amino acids compatible with restrictions sites; a is either 0 or 1; b is either 0 or 1; c is either 0 or 1; d is either 0 or 1; e is either 0 or 1; f is either 0 or 1; g is either 0 or 1; t is either 0 or 1; u is either 0 or 1; v is either 0 or 1; w is 0 or 1, x is either 0 or 1; y is either 0 or 1; z is either 0 or 1 with the proviso that t+u+v+w+x+y+z≧1; and XTEN is an extended recombinant polypeptide as described herein including, but not limited to AE42, AG42, AE288, AG288, AE864, and AG864.

[0283] In another embodiment of the CFXTEN composition, the invention provides an isolated fusion protein of formula VI:

(XTEN)ᵤ-(S)ₐ-(A1)-(S)_{b}-(XTEN)ᵥ-(S)_{b}-(A2)-(S)_{c}-(XTEN)_{w}-(S)_{c}-(A3)-(S)_{d}-(XTEN)ₓ-(S)_{d}-(C1)-(S)ₑ-(XTEN)_{y}-(S)ₑ-(C2)-(S)_{f}-(XTEN)_{z} VI

wherein independently for each occurrence, A1 is an A1 domain of FVIII; A2 is an A2 domain of FVIII; A3 is an A3 domain of FVIII; C1 is a C1 domain of FVIII; C2 is a C2 domain of FVIII; S is a spacer sequence having between 1 to about 50 amino acid residues that can optionally include a cleavage sequence or amino acids compatible with restrictions sites; a is either 0 or 1; b is either 0 or 1; c is either 0 or 1; d is either 0 or 1; e is either 0 or 1; f is either 0 or 1; u is either 0 or 1; v is either 0 or 1; w is 0 or 1, x is either 0 or 1; y is either 0 or 1; z is either 0 or 1 with the proviso that u+v+w+x+y+z≧1; and XTEN is an extended recombinant polypeptide as described herein including, but not limited to AE42, AG42, AE288, AG288, AE864, and AG864.

[0284] In another embodiment of the CFXTEN composition, the invention provides an isolated fusion protein of formula VII:

(SP)-(XTEN)ₓ-(CS)ₓ-(S)ₓ-(FVIII_{—}1-743)-(S)_{y}-(XTEN)-(S)_{y}-(FVIII_{—}1638-2332)-(S)_{z}-(CS)_{z}-(XTEN)_{z} VIIa

(SP)-(XTEN)ₓ-(CS)ₓ-(S)ₓ-(FVIII_{—}1-743)-(S)_{y}-(XTEN)-(S)_{y}-(FVIII_{—}1638-2332)-(S)_{z}-(CS)_{z}-(XTEN)_{z} VIIb

wherein independently for each occurrence, SP is a signal peptide, preferably with sequence MQIELSTCFFLCLLRFCFS, CS is a cleavage sequence listed in Table 7, S is a spacer sequence having between 1 to about 50 amino acid residues that can optionally include amino acids compatible with restrictions sites, “FVIII_{—}1-743” is residues 1-743 of Factor FVIII and “FVIII_{—}1638-2332” is residues 1638-2332 of FVIII, “FVIII_{—}1-743” is residues 1-743 of Factor FVIII and “FVIII_{—}1638-2332” is residues 1638-2332 of FVIII, x is either 0 or 1, y is either 0 or 1, and z is either 0 or 1, wherein x+y+z>2; and XTEN is an extended recombinant polypeptide as described herein including, but not limited to AE42, AG42, AE288, AG288, AE864, and AG864. In one embodiment of formula VII, the spacer sequence is GPEGPS. In another embodiment of formula VII, the spacer sequence is a sequence from Table 6.

[0285] In another embodiment of the CFXTEN composition, the invention provides an isolated fusion protein of formula VIII:

(XTEN)ᵤ-(S)ₐ-(A1)-(S)_{b}-(XTEN)ᵥ-(S)_{b}-(A2)-(B1)-(S)_{c}-(XTEN)_{w}-(S)_{c}-(B2)-(A3)-(S)_{d}-(XTEN)ₓ-(S)_{d}-(C1)-(S)ₑ-(XTEN)_{y}-(S)ₑ-(C2)-(S)_{f}-(XTEN)_{z} FVIII

wherein independently for each occurrence, A1 is an A1 domain of FVIII; A2 is an A2 domain of FVIII; B1 is a fragment of the B domain that can have from residues 740 to 743-750 of FVIII or alternatively from about residues 741 to about residues 743-750 of FVIII; B2 is a fragment of the B domain that can have from residues 1654-1686 to 1689 of FVIII or alternatively from about residues 1638 to about residues 1648 of FVIII; A3 is an A3 domain of FVIII; C1 is a C1 domain of FVIII; C2 is a C2 domain of FVIII; S is a spacer sequence having between 1 to about 50 amino acid residues that can optionally include a cleavage sequence or amino acids compatible with restrictions sites; a is either 0 or 1; b is either 0 or 1; c is either 0 or 1; d is either 0 or 1; e is either 0 or 1; f is either 0 or 1; u is either 0 or 1; v is either 0 or 1; w is 0 or 1, x is either 0 or 1; y is either 0 or 1; z is either 0 or 1 with the proviso that u+v+w+x+y+z≧1; and XTEN is an extended recombinant polypeptide as described herein including, but not limited to AE42, AG42, AE288, AG288, AE864, and AG864. In one embodiment of formula VIII, the spacer sequence is GPEGPS. In another embodiment of formula VIII, the spacer sequence is a sequence from Table 6.

[0286] The embodiments of formulae IV-VIII encompass CFXTEN configurations wherein one or more XTEN of lengths ranging from about 6 amino acids to ≧1000 amino acids (e.g., sequences selected from any one of Tables 3, 4, and 9-13 or fragments thereof, or sequences exhibiting at least about 90-98% or more sequence identity thereto) are inserted and linked between adjoining domains of the factor VIII, or are linked to the N- or C-terminus of the FVIII. The embodiments of formulae V-VIII further provide configurations wherein the XTEN are linked to FVIII domains via spacer sequences which can optionally comprise amino acids compatible with restrictions sites or can include cleavage sequences (e.g., the sequences of Tables 6 and 7, described more fully below) such that the XTEN encoding sequence can be, in the case of a restriction site, be integrated into a CFXTEN construct and, in the case of a cleavage sequence, the XTEN can be released from the fusion protein by the action of a protease appropriate for the cleavage sequence.

[0287] The embodiments of formulae VI-VIII differ from those of formula V in that the FVIII component of formulae VI-VIII are only the B-domain deleted forms (“FVIII BDD”) of factor VIII that retain short residual sequences of the B-domain, non-limiting examples of sequences of which are provided in Table 1, wherein one or more XTEN or fragments of XTEN of lengths ranging from about 6 amino acids to ≧1000 amino acids (e.g., sequences selected from any one of Tables 3, 4, and 9-13) are inserted and linked between adjoining domains of the factor VIII and/or between or within the remnants of the B domain residues. The invention contemplates all possible permutations of insertions of XTEN between the domains of FVIII or at or proximal to the insertion points of Table 5 or Table 25, described below, or those illustrated in FIG. 7, with optional linking of an additional XTEN to the N- or C-terminus of the FVIII, optionally linked via an additional cleavage sequence selected from Table 7, resulting in a CFXTEN composition; non-limiting examples of which are portrayed in FIGS. 5 and 10. In one embodiment, the CFXTEN comprises a FVIII BDD sequence of Table 1 or Table 31 in which one or more XTEN that each has at least about 80%, or at least about 90%, or at least about 95% or more sequence identity compared to a sequence from any one of Tables 3, 4, and 9-13 or fragments thereof are inserted between any two of the residual B domain amino acids of the FVIII BDD sequence, resulting in a single chain FVIII fusion protein, wherein the CFXTEN retains at least about 30%, or at least about 40%, or at least about 50%, or at least about 60%, or at least about 70%, or at least about 80%, or at least about 90% of the procoagulant activity of native FVIII. In the foregoing embodiment, the CFXTEN can have an additional XTEN sequence of any one of Tables 4, and 9-13 linked to the N- or C-terminus of the fusion protein. In one embodiment of a fusion protein of formula VII, the CFXTEN comprises a FVIII BDD sequence of Table 1 or Table 31 in which two or more XTEN that each has at least about 80%, or at least about 90%, or at least about 95%, or at least about 96%, or at least about 97%, or at least about 98%, or at least about 99%, or 100% sequence identity compared to a sequence from any one of Tables 3, 4, and 9-13 or fragments thereof are linked to a FVIII-BDD sequence in which at least one XTEN is inserted from about 3 to about 20 amino acid residues to the C-terminus side of the FVIII cleavage site amino acid R740 and from about 3 to about 20 amino acid residues to the N-terminus side of the FVIII cleavage site amino acid R1689 of the residual B domain amino acids of the FVIII BDD sequence, resulting in a single chain FVIII fusion protein, and one or two XTEN are linked by a cleavage sequence to the N- and/or C-terminus of the FVIII-BDD sequence, wherein the CFXTEN exhibits at least about 40%, or at least about 50%, or at least about 60%, or at least about 70%, or at least about 80%, or at least about 90% of the procoagulant activity of native FVIII after release of the XTEN by cleavage of the cleavage sequences.

[0288] In certain embodiments,

(XTEN)ᵥ-(S)ₐ-(A1)-(S)_{b}-(XTEN)_{w}-(S)_{b}-(A2)-(S)_{c}-(XTEN)ₓ-(S)_{c}-(A3)-(S)_{d}-(XTEN)_{y}-(S)_{d}-(C1)-(S)ₑ-(XTEN)_{z} (A)

[0289] wherein independently for each occurrence, A1 is an A1 domain of FVIII; A2 is an A2 domain of FVIII; A3 is an A3 domain of FVIII; C1 is a C1 domain of FVIII; S is a spacer sequence having between 1 to about 50 amino acid residues that can optionally include a cleavage sequence or amino acids compatible with restrictions sites, wherein for each occurrence, if there is any, the sequence of the spacer can be the same or different; wherein (i) a is either 0 or 1; (ii) b is either 0 or 1; (iii) c is either 0 or 1; (iv) d is either 0 or 1; (v) e is either 0 or 1; (vi) v is either 0 or 1; (vii) w is 0 or 1; (viii) x is either 0 or 1; (ix) y is either 0 or 1; and (x) z is either 0 or 1, with the proviso that v+w+x+y+z≧1. In one embodiment, the A3 domain comprises an a3 acidic region or a portion thereof. In another embodiment, at least one XTEN is inserted within the a3 acidic region or the portion thereof, N-terminus of the a3 acidic region or the portion thereof, C-terminus of the a3 acidic region or the portion thereof, or a combination thereof. In other embodiments, the factor VIII polypeptide further comprises C2 domain. In certain embodiments, at least one XTEN is inserted within the C2 domain, N-terminus of C2 domain, C-terminus of C2 domain, or a combination thereof. In still other embodiments, the Factor VIII comprises all or portion of B domain. In yet other embodiments, at least one XTEN is inserted within all or a portion of B domain, N-terminus of B domain, C-terminus of B domain, or a combination thereof.

[0290] 2. CFXTEN Fusion Protein Configurations with Internal XTEN

[0291] In another aspect, the invention provides CFXTEN configured with one or more XTEN sequences located internal to the FVIII sequence. In one embodiment, invention provides CFXTEN configured with one or more XTEN sequences located internal to the FVIII sequence to confer increased stability and resistance to proteases and/or clearance mechanisms, including but not limiting to interaction with clearance receptors, compared to FVIII without the incorporated XTEN.

[0292] The invention contemplates that different configurations or sequence variants of FVIII can be utilized as the platform into which one or more XTEN are inserted. These configurations include, but are not limited to, native FVIII, FVIII BDD, and single chain FVIII (scFVIII), and variants of those configurations. In the case of scFVIII, the invention provides CFXTEN that can be constructed by replacing one or multiple amino acids of the processing site of FVIII. In one embodiment, the scFVIII is created by replacing the R1648 in the sequence RHQREITR with glycine or alanine to prevent proteolytic processing to the heterodimer form. In some embodiments, the invention provides CFXTEN comprising scFVIII wherein parts of the sequence surrounding the R1648 processing site are replaced with XTEN, as illustrated in FIGS. 10A and 10B. In one embodiment, at least about 60%, or about 70%, or about 80%, or about 90%, or about 95%, or about 97% or more of the B-domain is replaced with an XTEN sequence disclosed herein, including one or more of the R740, R1648, or R1689 cleavage sites. In another embodiment, the CFXTEN has the sequence of the B-domain between the FXIa cleavage sites at R740 and R1689 (with at least 1-5 adjacent B-domain amino acids also retained between the cut site and the start of the XTEN to permit the protease to access the cut site) replaced with XTEN. In another embodiment, the CFXTEN has the sequence of the B-domain between the FXIa cleavage site at N745 and P1640 replaced with XTEN. In other embodiments, the invention provides CFXTEN FVIII BDD sequence variants in which portions of the B-domain are deleted but only one of the FXI R740 or R1689 activation sites (and 1-5 adjacent amino acids of the B-domain) are left within the construct, wherein the XTEN remains attached at one end to either the light or heavy chain after cleavage by FXIa, as illustrated in FIGS. 5B and 5D. In one embodiment of the foregoing, the CFXTEN comprises a FVIII BDD sequence in which the amino acids between N745 to P1640 or between 5743 to Q1638 are deleted and an XTEN sequence is linked between these amino acids, connecting the heavy and light chains, and can further comprise additional XTEN inserted either in external surface loops, between FVIII domains, or at the N- or C-termini of the FVIII BDD sequence, such as one or more insertion sites from Table 5 or Table 25, or those illustrated in FIG. 7. In another embodiment of the foregoing, the CFXTEN comprises a FVIII BDD sequence in which the amino acids between K713 to Q1686 or between residues 741 and 1648 are deleted and an XTEN linked between the two amino acids, and additional XTEN can be inserted either in surface loops, between FVIII domains, or at the N- or C-termini of the FVIII BDD sequence, including but not limited to one or more insertion sites from Table 5 or Table 25. In some embodiments such CFXTEN sequences can have one or more XTEN exhibiting at least about 80%, or at least about 90%, or at least about 95%, or at least about 96%, or at least about 97%, or at least about 98%, or at least about 99%, or 100% sequence identity to an XTEN sequence from any one of Tables 4 and 9-13.

[0293] The invention contemplates other CFXTEN with internal XTEN in various configurations; schematics of exemplary configurations are illustrated in FIGS. 5 and 10. The regions suitable for XTEN insertion sites include the known domain boundaries of FVIII, exon boundaries, known surface (external) loops and solvent accessible surface area sites identified by X-ray crystallography analysis, and structure models derived from molecular dynamic simulations of FVIII, regions with a low degree of order (assessed by programs described in FIG. 6 legend), regions of low homology/lack of conservation across different species, and hydrophilic regions. In another embodiment, XTEN insertion sites were selected based on FVIII putative clearance receptor binding sites. In another embodiment, CFXTEN comprises XTEN inserted at locations not within close proximity to mutations implicated in hemophilia A listed in the Haemophilia A Mutation, Search, Test and Resource Site (HAMSTeRS) database were eliminated (Kemball-Cook G, et al. The factor VIII Structure and Mutation Resource Site: HAMSTeRS version 4. Nucleic Acids Res. (1998) 26(1):216-219). In another embodiment, potential sites for XTEN insertion include residues within FVIII epitopes that are capable of being bound by anti-FVIII antibodies occurring in sensitized hemophiliacs and that do not otherwise serve as protein interactive sites. Regions and/or sites that are considered for exclusion as XTEN insertion sites include residues/regions of factor VIII that are important in various interactions including other clotting proteins, residues surrounding each arginine activating/inactivating cleavage site acted on by the proteases thrombin, factor Xa, activated protein C, residues surrounding the signal peptide processing site (residue 1) if the construct contains the signal peptide, regions known to interact with other proteins such as FIXa, FX/FXa, thrombin, activated protein C, protein S cofactor to Protein C, von Willebrand factor, sites known to interact with phospholipid cofactors in coagulation, residues involved in domain interactions, residues coordinating Ca⁺⁺ or Cu⁺⁺ ions, cysteine residues involved in S—S intramolecular bonds, documented amino acid insertion and point mutation sites in FVIII produced in hemophilia A subjects affecting procoagulant activity, and mutation sites in FVIII made in a research lab that affect procoagulant activity. Sites considered for either insertion (to prolong half-life) or for exclusion (needed to remove spent FVIIIa or FXa) include regions known to interact with heparin sulfate proteoglycan (HSPG) or low-density lipoprotein receptor-related protein (LPR).

[0294] By analysis of the foregoing criteria, different insertion sites across the FVIII BDD sequence have been identified as candidates for insertion of XTEN, non-limiting examples of which are listed in Table 5, Table 25, and are shown schematically in FIGS. 6 and 7. In one embodiment, CFXTEN comprise XTEN insertions between the individual domains of FVIII, i.e., between the A1 and A2, or between the A2 and the B, or between the B and the A3, or between the A3 and the C1, or between the C1 and the C2 domains. In another embodiment, CFXTEN comprises XTEN inserted within the B domain or between remnant residues of the BDD sequence. In another embodiment, CFXTEN comprises XTEN inserted at known exon boundaries of the encoding FVIII gene as exons represent evolutionary conserved sequence modules that have a high probability of functioning in the context of other protein sequences. In another embodiment, CFXTEN comprise XTEN inserted within surface loops identified by the x-ray structure of FVIII. In another embodiment, CFXTEN comprise XTEN inserted within regions of low order identified as having low or no detected electron density by X-ray structure analysis. In another embodiment, CFXTEN comprise XTEN inserted within regions of low order, predicted by structure prediction algorithms such as, but not limited to FoldIndex, RONN, and Kyte & Doolittle algorithms. In another embodiment, CFXTEN comprise XTEN inserted within sequence areas of high frequency of hydrophilic amino acids. In another embodiment, CFXTEN comprise XTEN inserted within epitopes capable of being bound by naturally-occurring anti-FVIII antibodies in sensitized hemophiliacs. In another embodiment, CFXTEN comprise XTEN inserted within sequence areas of low sequence conservation and/or differences in sequence segment length across FVIII sequences from different species. In another embodiment, CFXTEN comprise XTEN linked to the N-terminus and/or C-terminus. In another embodiment, the invention provides CFXTEN configurations with inserted XTEN selected from two or more of the criteria from the embodiments listed above. In another embodiment, the invention provides CFXTEN configurations with at least one, alternatively at least two, alternatively at least three, alternatively at least four, alternatively at least five or more XTEN inserted into a factor VIII sequence wherein the points of insertion are at or proximal to the N- or C-terminus side of the at least one, two, three, four, or five or more amino acids selected from the insertion residue amino acids of Table 5 or Table 25, or alternatively within one, or within two, or within three, or within four, or within five, or within six amino acids of the insertion residue amino acids from Table 5 or Table 25, or within the various spans of the insertion residue amino acids schematically portrayed for an exemplary FVIII BDD sequence in FIG. 7. For clarity, an XTEN inserted internal to the FVIII sequence in the foregoing embodiments is linked at its N- and C-termini to the adjoining FVIII amino acids such that the resulting CFXTEN is expressed as a linear, monomeric fusion protein (prior to any post-translational modification).

[0295] As described above, the one or more internally-located XTEN or a fragment of XTEN can have a sequence length of 6 to 1000 or more amino acid residues. In some embodiments, wherein the CFXTEN have one or two or three or four or five or more XTEN sequences internal to the FVIII, the XTEN sequences can be identical or can be different. In one embodiment, each internally-located XTEN has at least about 80% sequence identity, or alternatively 81%, 82%, 83%, 84%, 85%, 86%, 87%, 88%, 89%, 90%, 91%, 92%, 93%, 94%, 95%, 96%, 97%, 98%, 99%, or 100% sequence identity compared to comparable lengths or fragments of XTEN selected from any one of Tables 3, 4, and 9-13, when optimally aligned. In another embodiment, the invention provides a CFXTEN configured with one or more XTEN inserted internal to a FVIII BDD sequence of Table 1 or Table 31 according to or proximal to the insertion points indicated in Table 5 or Table 25 or as illustrated in FIG. 7, as described herein. It will be understood by those of skill in the art that an XTEN inserted within the FVIII sequence at an insertion point of Table 5 or Table 25 is linked by its N- and C-termini to flanking FVIII amino acids (or via spacer or cleavage sequences, as described above), while an XTEN linked to the N- or C-terminus of FVIII would only be linked to a single FVIII amino acid (or to a spacer or cleavage sequence amino acid, as described above). By way of example only, a CFXTEN with three internal XTEN could have XTEN incorporated between FVIII BDD residues R29 and F30 (between the N-terminus of residue number 29 and the C-terminus of residue 30; i.e., insertion site no. 6 of Table 5), G182 and 5183 (insertion site no. 9 of Table 5) and G1981 and V1982 (insertion site no. 39). In a variation of the foregoing embodiment, the CFXTEN with a BDD FVIII and the one or more internal XTEN has an additional XTEN located at or proximal to (e.g., within 6 amino acids) the N- and/or C-terminus of the FVIII sequence wherein each XTEN has at least about 80% sequence identity, or alternatively 81%, 82%, 83%, 84%, 85%, 86%, 87%, 88%, 89%, 90%, 91%, 92%, 93%, 94%, 95%, 96%, 97%, 98%, 99%, or 100% sequence identity compared to an XTEN selected from any one of Tables 4, and 9-13. In the foregoing fusion protein embodiments hereinabove described in this paragraph, the CFXTEN fusion protein can further comprise one or more cleavage sequence from Table 7 or other sequences known in the art, the cleavage sequence being located between or within 6 amino acid residues of the intersection of the FVIII and the XTEN sequences, which may include two cleavage sequences in a given internal XTEN sequence. In one embodiment, the CFXTEN comprising cleavage sequences has two identical cleavage sequences, each located at or near the respective ends of one or more internal XTEN such that the XTEN is released from the fusion protein when cleaved by the protease that binds to and cleaves that sequence. The sequences that can be cleaved are described more fully below and exemplary sequences are provided in Table 7.

TABLE 5
Insertion locations for XTEN linked to the FVIII BDD sequence

| | XTEN Insertion | Insertion | FVIII BDD Downstream | FVIII |
|---|---|---|---|---|
| No. | Point* | Residue** | Sequence*** | Domain |
| 1 | 1 | A | TRR | A1 |
| 2 | 28 | A | RFP | A1 |
| 3 | 61 | I | AKP | A1 |
| 4 | 111 | G | AEY | A1 |
| 5 | 128 | V | FPG | A1 |
| 6 | 182 | G | SLA | A1 |
| 7 | 205 | G | KSW | A1 |
| 8 | 211 | E | TKN | A1 |
| 9 | 223 | A | SAR | A1 |
| 10 | 244 | G | LIG | A1 |
| 11 | 318 | D | GME | A1 |
| 12 | 334 | Q | LRM | A1 |
| 13 | 345 | D | YDD | A1 |
| 14 | 376 | K | KHP | A2 |
| 15 | 405 | R | SYK | A2 |
| 16 | 463 | I | IFK | A2 |
| 17 | 493 | K | GVK | A2 |
| 18 | 566 | I | MSD | A2 |
| 19 | 598 | P | AGV | A2 |
| 20 | 616 | S | ING | A2 |
| 21 | 686 | G | LWI | A2 |
| 22 | 1640 | P | PVL | B |
| 23 | 1652 | R | TTL | B |
| 24 | 1713 | S | SPH | A3 |
| 25 | 1724 | S | GSV | A3 |
| 26 | 1773 | V | TFR | A3 |
| 27 | 1793 | E | EDQ | A3 |
| 28 | 1799 | G | AEP | A3 |
| 29 | 1808 | K | PNE | A3 |
| 30 | 1844 | E | KDV | A3 |
| 31 | 1920 | A | ING | A3 |
| 32 | 1981 | G | VFE | A3 |
| 33 | 2020 | K | CQT | C1 |
| 34 | 2044 | G | QWA | C1 |
| 35 | 2073 | V | DLL | C1 |
| 36 | 2093 | F | SSL | C1 |
| 37 | 2125 | V | FFG | C1 |
| 38 | 2173 | S | CSM | C2 |
| 39 | 2223 | V | NNP | C2 |
| 40 | 2278 | G | KVK | C2 |
| 41 | 2332 | Y | C terminus of FVIII | C2 |

*Indicates an insertion point for XTEN based on the amino acid number of the mature FVIII protein, wherein the insertion could be either on the N- or C-terminal side of the indicatedamino acid
**N-terminus residue side of the insertion point, excepting site no. 1
***The 3 amino acids of FVIII BDD sequence downstream from the insertion site (that would be joined to the C-terminus of the inserted XTEN sequence

[0296] In another aspect, the invention provides libraries of components and methods to create the libraries derived from nucleotides encoding FVIII segments, XTEN, and FVIII segments linked to XTEN that are useful in the preparation of genes encoding the subject CFXTEN. In a first step, a library of genes encoding FVIII and XTEN inserted into the various single sites at or within 1-6 amino acids of an insertion site identified in Table 5 are created, expressed, and the CFXTEN recovered and evaluated for activity and pharmacokinetics as illustrated in FIG. 13. Those CFXTEN showing enhanced properties are then used to create genes encoding a FVIII segment and the insertion site plus an XTEN, with components from each enhanced insertion represented in the library, as illustrated in FIG. 16. In one embodiment, the library components are assembled using standard recombinant techniques in combinatorial fashion, as illustrated in FIG. 16, resulting in permutations of CFXTEN with multiple internal and N- and C-terminus XTEN, that can include the insertion sites of or proximal to those Table 5 or Table 25 or as illustrated in FIG. 7. The resulting constructs would then be evaluated for activity and enhanced pharmacokinetics, and those candidates resulting in CFXTEN with enhanced properties, e.g., reduced active clearance, resistance to proteases, reduced immunogenicity, and enhance pharmacokinetics, compared to FVIII not linked to XTEN, are evaluated further.

[0297] 3. CFXTEN Fusion Protein Configurations with Spacer and Cleavage Sequences

[0298] In another aspect, the invention provides CFXTEN configured with one or more spacer sequences incorporated into or adjacent to the XTEN that are designed to incorporate or enhance a functionality or property to the composition, or as an aid in the assembly or manufacture of the fusion protein compositions. Such properties include, but are not limited to, inclusion of cleavage sequence(s) to permit release of components, inclusion of amino acids compatible with nucleotide restrictions sites to permit linkage of XTEN-encoding nucleotides to FVIII-encoding nucleotides or that facilitate construction of expression vectors, and linkers designed to reduce steric hindrance in regions of CFXTEN fusion proteins.

[0299] In an embodiment, a spacer sequence can be introduced between an XTEN sequence and a FVIII component to decrease steric hindrance such that the FVIII component may assume its desired tertiary structure and/or interact appropriately with its target substrate or processing enzyme. For spacers and methods of identifying desirable spacers, see, for example, George, et al. (2003) Protein Engineering 15:871-879, specifically incorporated by reference herein. In one embodiment, the spacer comprises one or more peptide sequences that are between 1-50 amino acid residues in length, or about 1-25 residues, or about 1-10 residues in length. Spacer sequences, exclusive of cleavage sites, can comprise any of the 20 natural L amino acids, and will preferably have XTEN-like properties in that the majority of residues will be hydrophilic amino acids that are sterically unhindered such as, but not limited to, glycine (G), alanine (A), serine (S), threonine (T), glutamate (E), proline (P) and aspartate (D). The spacer can be polyglycines or polyalanines, or is predominately a mixture of combinations of glycine, serine and alanine residues. In one embodiment, a spacer sequence, exclusive of cleavage site amino acids, has about 1 to 10 amino acids that consist of amino acids selected from glycine (G), alanine (A), serine (S), threonine (T), glutamate (E), and proline (P) and are substantially devoid of secondary structure; e.g., less than about 10%, or less than about 5% as determined by the Chou-Fasman and/or GOR algorithms. In one embodiment, the spacer sequence is GPEGPS. In another embodiment, the spacer sequence is GPEGPS linked to a cleavage sequence of Table 7. In addition, spacer sequences are designed to avoid the introduction of T-cell epitopes which can, in part, be achieved by avoiding or limiting the number of hydrophobic amino acids utilized in the spacer; the determination of epitopes is described above and in the Examples.

[0300] In a particular embodiment, the CFXTEN fusion protein comprises one or more spacer sequences linked at the junction(s) between the payload FVIII sequence and the one or more XTEN incorporated into the fusion protein, wherein the spacer sequences comprise amino acids that are compatible with nucleotides encoding restriction sites. In another embodiment, the CFXTEN fusion protein comprises one or more spacer sequences linked at the junction(s) between the payload FVIII sequence and the one more XTEN incorporated into the fusion protein wherein the spacer sequences comprise amino acids that are compatible with nucleotides encoding restriction sites and the amino acids and the one more spacer sequence amino acids are chosen from glycine (G), alanine (A), serine (S), threonine (T), glutamate (E), and proline (P). In another embodiment, the CFXTEN fusion protein comprises one or more spacer sequences linked at the junction(s) between the payload FVIII sequence and one more XTEN incorporated into the fusion protein wherein the spacer sequences comprise amino acids that are compatible with nucleotides encoding restriction sites and the one more spacer sequences are chosen from the sequences of Table 6. The exact sequence of each spacer sequence is chosen to be compatible with cloning sites in expression vectors that are used for a particular CFXTEN construct. In one embodiment, the spacer sequence has properties compatible with XTEN. In one embodiment, the spacer sequence is GAGSPGAETA. For XTEN sequences that are incorporated internal to the FVIII sequence, each XTEN would generally be flanked by two spacer sequences comprising amino acids compatible with restriction sites, while XTEN attached to the N- or C-terminus would only require a single spacer sequence at the junction of the two components and another at the opposite end for incorporation into the vector. As would be apparent to one of ordinary skill in the art, the spacer sequences comprising amino acids compatible with restriction sites that are internal to FVIII could be omitted from the construct when an entire CFXTEN gene is synthetically generated.

TABLE 6
Spacer Sequences Compatible with Restriction Sites

| Spacer Sequence | Restriction Enzyme |
|---|---|
| GSPG | BsaI |
| ETET | BsaI |
| PGSSS | BbsI |
| GAP | AscI |
| GPA | FseI |
| GPSGP | SfiI |
| AAA | SacII |
| TG | Agel |
| GT | KpnI |
| GAGSPGAETA | SfiI |

[0301] In another aspect, the present invention provides CFXTEN configurations with cleavage sequences incorporated into the spacer sequences. In some embodiments, spacer sequences in a CFXTEN fusion protein composition comprise one or more cleavage sequences, which are identical or different,

[0302] wherein the cleavage sequence may be acted on by a protease, as shown in FIG. 10, to release FVIII, a FVIII component (e.g., the B domain) or XTEN sequence(s) from the fusion protein. In one embodiment, the incorporation of the cleavage sequence into the CFXTEN is designed to permit release of the FVIII component that becomes active or more active (with respect to its ability serve as a membrane binding site for factors IXa and X) upon its release from the XTEN. In the foregoing embodiment, the procoagulant activity of FVIII component of the CFXTEN is increased after cleavage by at least 30%, or at least 40%, or at least 50%, or at least 60%, or at least 70%, or at least 80%, or at least 90% compared to the intact CFXTEN. The cleavage sequences are located sufficiently close to the FVIII sequences, generally within 18, or within 12, or within 6, or within 2 amino acids of the FVIII sequence, such that any remaining residues attached to the FVIII after cleavage do not appreciably interfere with the activity (e.g., such as binding to a clotting protein) of the FVIII, yet provide sufficient access to the protease to be able to effect cleavage of the cleavage sequence. In some cases, the CFXTEN comprising the cleavage sequences will also have one or more spacer sequence amino acids between the FVIII and the cleavage sequence or the XTEN and the cleavage sequence to facilitate access of the protease; the spacer amino acids comprising any natural amino acid, including glycine, serine and alanine as preferred amino acids. In one embodiment, the cleavage site is a sequence that can be cleaved by a protease endogenous to the mammalian subject such that the CFXTEN can be cleaved after administration to a subject. In such case, the CFXTEN can serve as a prodrug or a circulating depot for the FVIII. In a particular construct of the foregoing, the CFXTEN would have one or two XTEN linked to the N- and/or the C-terminus of a FVIII-BDD via a cleavage sequence that can be acted upon by an activated coagulation factor, and would have an additional XTEN located between the processing amino acids of the B-domain at position R740 and R1689 such that the XTEN could be released, leaving a form of FVIII similar to native activated FVIII. In one embodiment of the foregoing construct, the FVIII that is released from the fusion protein by cleavage of the cleavage sequence exhibits at least about a two-fold, or at least about a three-fold, or at least about a four-fold, or at least about a five-fold, or at least about a six-fold, or at least about a eight-fold, or at least about a ten-fold, or at least about a 20-fold increase in activity compared to the intact CFXTEN fusion protein.

[0303] Examples of cleavage sites contemplated by the invention include, but are not limited to, a polypeptide sequence cleavable by a mammalian endogenous protease selected from FXIa, FXIIa, kallikrein, FVIIIa, FVIIIa, FXa, FIIa (thrombin), Elastase-2, granzyme B, MMP-12, MMP-13, MMP-17 or MMP-20, or by non-mammalian proteases such as TEV, enterokinase, PreScission™ protease (rhinovirus 3C protease), and sortase A. Sequences known to be cleaved by the foregoing proteases and others are known in the art. Exemplary cleavage sequences contemplated by the invention and the respective cut sites within the sequences are presented in Table 7, as well as sequence variants thereof. For CFXTEN comprising incorporated cleavage sequence(s), it is generally preferred that the one or more cleavage sequences are substrates for activated clotting proteins. For example, thrombin (activated clotting factor II) acts on the sequence LTPRSLLV [Rawlings N. D., et al. (2008) Nucleic Acids Res., 36: D320], which is cut after the arginine at position 4 in the sequence. Active FIIa is produced by cleavage of FII by FXa in the presence of phospholipids and calcium and is down stream from factor VIII in the coagulation pathway. Once activated, its natural role in coagulation is to cleave fibrinogen, which then in turn, begins clot formation. FIIa activity is tightly controlled and only occurs when coagulation is necessary for proper hemostasis. By incorporation of the LTPRSLLV sequence into the CFXTEN between and linking the FVIII and the XTEN components, the XTEN is removed from the adjoining FVIII concurrent with activation of either the extrinsic or intrinsic coagulation pathways when coagulation is required physiologically, thereby selectively releasing FVIII. In another embodiment, the invention provides CFXTEN with incorporated FXIa cleavage sequences between the FVIII and XTEN component(s) that are acted upon only by initiation of the intrinsic coagulation system, wherein a procoagulant form of FVIII is released from XTEN by FXIa to participate in the coagulation cascade. While not intending to be bound by any particular theory, it is believed that the CFXTEN of the foregoing embodiment would sequester the FVIII away from the other coagulation factors except at the site of active clotting, thus allowing for larger doses (and therefore longer dosing intervals) with minimal safety concerns.

[0304] Thus, cleavage sequences, particularly those susceptible to the procoagulant activated clotting proteins listed in Table 7, would provide for sustained release of FVIII that, in certain embodiments of the CFXTEN, can provide a higher degree of activity for the FVIII component released from the intact form of the CFXTEN, as well as additional safety margin for high doses of CFXTEN administered to a subject. In one embodiment, the invention provides CFXTEN comprising one or more cleavage sequences operably positioned to release the FVIII from the fusion protein upon cleavage, wherein the one or more cleavage sequences has at least about 86%, or at least about 92%, or 100% sequence identity to a sequence selected from Table 7. In another embodiment, the CFXTEN comprising a cleavage sequence would have at least about 80%, or at least about 85%, or at least about 90%, or at least about 95%, or at least about 96%, or at least about 97%, or at least about 98%, or at least about 99% sequence identity compared to a sequence selected from Table 30.

[0305] In some embodiments, only the two or three amino acids flanking both sides of the cut site (four to six amino acids total) are incorporated into the cleavage sequence that, in turn, is incorporated into the CFXTEN of the embodiments, providing, e.g., XTEN release sites. In other embodiments, the incorporated cleavage sequence of Table 7 can have one or more deletions or insertions or one or two or three amino acid substitutions for any one or two or three amino acids in the known sequence, wherein the deletions, insertions or substitutions result in reduced or enhanced susceptibility but not an absence of susceptibility to the protease, resulting in an ability to tailor the rate of release of the FVIII from the XTEN. Exemplary substitutions within cleavage sequences that are utilized in the CFXTEN of the invention are shown in Table 7.

TABLE 7
Protease Cleavage Sequences

| Protease Acting | Exemplary | |
|---|---|---|
| Upon | Cleavage | |
| Sequence | Sequence | Minimal Cut Site* |
| FXIa | KLTR↓AET | KD/FL/T/R↓VA/VE/GT/GV |
| FXIa | DFTR↓VVG | KD/FL/T/R↓VA/VE/GT/GV |
| FXIIa | TMTR↓IVGG | NA |
| Kallikrein | SPFR↓STGG | —/—/FL/RY↓SR/RT/—/— |
| FVIIa | LQVR↓IVGG | NA |
| FIXa | PLGR↓IVGG | —/—/G/R↓—/—/—/— |
| FXa | IEGR↓TVGG | IA/E/GFP/R↓STI/VFS/—/G |
| FIIa (thrombin) | LTPR↓SLLV | —/—/PLA/R↓SAG/—/—/— |
| Elastase-2 | LGPV↓SGVP | —/—/—/VIAT↓—/—/—/— |
| Granzyme-B | VAGD↓SLEE | V/—/—/D↓—/—/—/— |
| MMP-12 | GPAG↓LGGA | G/PA/—/G↓L/—/G/— |
| MMP-13 | GPAG↓LRGA | G/P/—/G↓L/—/GA/— |
| MMP-17 | APLG↓LRLR | —/PS/—/—↓LQ/—/LT/— |
| MMP-20 | PALP↓LVAQ | NA |
| TEV | ENLYFQ↓G | ENLYFQ↓G/S |
| Enterokinase | DDDK↓IVGG | DDDK↓IVGG |
| Protease 3C | LEVLFQ↓GP | LEVLFQ↓GP |
| (PreScission ™) | | |
| Sortase A | LPKT↓GSES | L/P/KEAD/T↓G/—/EKS/S |

↓ indicates cleavage site
NA: not applicable
*the listing of multiple amino acids before, between, or after a slash indicate alternative amino acids that can be substituted at the position;
“—” indicates that any amino acid may be substituted for the corresponding amino acid indicated in the middle column

[0306] 4. Exemplary CFXTEN Fusion Protein Sequences

[0307] Non-limiting examples of sequences of fusion proteins containing a single FVIII linked to a single XTEN, either joined at the N- or C-terminus are presented in Tables 14 and 28. Non-limiting examples of sequences of fusion proteins containing a single FVIII with XTEN incorporated internally to the FVIII sequence are presented in Tables 14 and 29, which may include one or two terminal XTEN. In one embodiment, a CFXTEN composition comprises a fusion protein having at least about 80% sequence identity compared to a CFXTEN from Table 14, Table 28 or Table 29, alternatively at least about 81%, 82%, 83%, 84%, 85%, 86%, 87%, 88%, 89%, 90%, 91%, 92%, 93%, 94%, 95%, 96%, 97%, 98%, 99%, or about 100% sequence identity as compared to a CFXTEN from Table 14, Table 28 or Table 29, when optimally aligned. However, the invention also contemplates substitution of any of the FVIII sequences of Table 1 or Table 31 for a FVIII component of the CFXTEN of Table 14, 24 or Table 29, and/or substitution of any sequence of any one of Tables 3, 4, and 9-13 for an XTEN component of the CFXTEN of Tables 14, 28 or 29. Generally, the resulting CFXTEN of the foregoing examples retain at least a portion of the procoagulant activity of the corresponding CF not linked to the XTEN. In the foregoing fusion proteins hereinabove described in this paragraph, the CFXTEN fusion protein can further comprise one or more cleavage sequences; e.g., a sequence from Table 7, the cleavage sequence being located between the CF and the XTEN or between adjacent FVIII domains linked by XTEN. In some embodiments comprising cleavage sequence(s), the intact CFXTEN composition has less activity but a longer half-life in its intact form compared to a corresponding FVIII not linked to the XTEN, but is designed such that upon administration to a subject, the FVIII component is gradually released from the fusion protein by cleavage at the cleavage sequence(s) by endogenous proteases, whereupon the FVIII component exhibits procoagulant activity, i.e., the ability to effectively bind to and activate its target coagulation protein substrate. In non-limiting examples, the CFXTEN with a cleavage sequence has about 80% sequence identity compared to a sequence from Table 30, or about 85%, or about 90%, or about 95%, or about 97%, or about 98%, or about 99% sequence identity compared to a sequence from Table 30. However, the invention also contemplates substitution of any of the FVIII sequences of Table 1 or Table 31 for a FVIII component of the CFXTEN of Table 30, substitution of any sequence of any one of Tables 3, 4, and 9-13 for an XTEN component of the CFXTEN of Table 30, and substitution of any cleavage sequence of Table 7 for a cleavage component of the CFXTEN of Table 30. In some cases, the CFXTEN of the foregoing embodiments in this paragraph serve as prodrugs or a circulating depot, resulting in a longer terminal half-life compared to FVIII not linked to the XTEN. In such cases, a higher concentration of CFXTEN can be administered to a subject to maintain therapeutic blood levels for an extended period of time compared to the corresponding FVIII not linked to XTEN because a smaller proportion of the circulating composition is active.

[0308] The CFXTEN compositions of the embodiments can be evaluated for activity using assays or in vivo parameters as described herein (e.g., in vitro coagulation assays, assays of Table 27, or a pharmacodynamic effect in a preclinical hemophilia model or in clinical trials in humans, using methods as described in the Examples or other methods known in the art for assessing FVIII activity) to determine the suitability of the configuration or the FVIII sequence variant, and those CFXTEN compositions (including after cleavage of any incorporated XTEN-releasing cleavage sites) that retain at least about 30%, or about 40%, or about 50%, or about 55%, or about 60%, or about 70%, or about 80%, or about 90%, or about 95% or more activity compared to native FVIII sequence are considered suitable for use in the treatment of FVIII-related diseases, disorder or conditions.

### Exemplary Embodiments of CFXTEN

[0309] The following are non-limiting examples of the invention:

Item 1. An isolated fusion protein comprising at least one extended recombinant polypeptide (XTEN), wherein said fusion protein having a structure of formula VIII:

(XTEN)ᵤ-(S)a-(A1)-(S)b-(XTEN)v-(S)b-(A2)-(B1)-(S)c-(XTEN)w-(S)c-(B2)-(A3)-(S)d-(XTEN)x-(S)d-(C1)-(S)e-(XTEN)y-(S)e-(C2)-(S)f-(XTEN)z VIII

wherein independently for each occurrence,

[0310] a) A1 is an A1 domain of FVIII;

[0311] b) A2 is an A2 domain of FVIII;

[0312] c) B1 is a fragment of the N-terminal end of the B domain having amino acid residues from residue number 740 to about number 745 of a native FVIII sequence;

[0313] d) B2 is a fragment of the C-terminal end of the B domain having amino acid residues from about residue numbers 1640 to number 1689 of a native FVIII sequence;

[0314] e) A3 is an A3 domain of FVIII;

[0315] f) C1 is a C1 domain of FVIII;

[0316] g) C2 is a C2 domain of FVIII;

[0317] h) S is a spacer sequence having between 1 to about 50 amino acid residues that can optionally include a cleavage sequence or amino acids compatible with restrictions sites, wherein for each occurrence, if there is any, the sequence of the spacer can be the same or different;

[0318] i) a is either 0 or 1;

[0319] j) b is either 0 or 1;

[0320] k) c is either 0 or 1;

[0321] l) d is either 0 or 1;

[0322] m) e is either 0 or 1;

[0323] n) f is either 0 or 1;

[0324] o) u is either 0 or 1;

[0325] p) v is either 0 or 1;

[0326] q) w is 0 or 1;

[0327] r) x is either 0 or 1;

[0328] s) y is either 0 or 1;

[0329] t) z is either 0 or 1, with the proviso that u+v+w+x+y+z>1; and

wherein the at least one XTEN is characterized in that:

[0330] a. the XTEN comprises at least 36 amino acid residues;

[0331] b. the sum of glycine (G), alanine (A), serine (S), threonine (T), glutamate (E) and proline (P) residues constitutes more than about 80% of the total amino acid residues of the XTEN;

[0332] c. the XTEN is substantially non-repetitive such that (i) the XTEN contains no three contiguous amino acids that are identical unless the amino acids are serine; (ii) at least about 80% of the XTEN sequence consists of non-overlapping sequence motifs, each of the sequence motifs comprising about 9 to about 14 amino acid residues consisting of four to six amino acids selected from glycine (G), alanine (A), serine (S), threonine (T), glutamate (E) and proline (P), wherein any two contiguous amino acid residues do not occur more than twice in each of the non-overlapping sequence motifs; or (iii) the XTEN sequence has a subsequence score of less than 10;

[0333] d. the XTEN has greater than 90% random coil formation as determined by GOR algorithm;

[0334] e. the XTEN has less than 2% alpha helices and 2% beta-sheets as determined by Chou-Fasman algorithm;

[0335] f. the XTEN lacks a predicted T-cell epitope when analyzed by TEPITOPE algorithm,

[0336] wherein the TEPITOPE threshold score for said prediction by said algorithm has a threshold of −9.

Item 2. The isolated fusion protein of item 1, comprising at least two XTENs, wherein the cumulative length of the XTENs is between about 100 to about 3000 amino acid residues.
Item 3. The isolated fusion protein of item 2, wherein each XTEN exhibits at least 90% sequence identity to a sequence of comparable length from any one of Table 4, Table 9, Table 10, Table 11, Table 12, and Table 13, when optimally aligned.
Item 4. The isolated fusion protein of any one of items 1-3, wherein the optional cleavage sequence(s) are cleavable by a mammalian protease selected from the group consisting of factor XIa, factor XIIa, kallikrein, factor VIIa, factor IXa, factor Xa, factor IIa (thrombin), Elastase-2, MMP-12, MMP13, MMP-17 and MMP-20, wherein upon cleavage of the cleavage sequences, at least one XTEN is cleaved from the fusion protein and the cleaved fusion protein exhibits an increase in procoagulant activity of at least about 30% compared to the uncleaved fusion protein.
Item 5. The isolated fusion protein of any one of items 1-4, wherein said fusion protein exhibits a prolonged in vitro half-life as compared to a corresponding factor VIII polypeptide lacking said XTEN.
Item 6. The isolated fusion protein of any one of items 1-5, wherein said fusion protein exhibits a terminal half-life longer than at least 48 hours when administered to a subject.
Item 7. An isolated fusion protein comprising a factor VIII polypeptide and at least one extended recombinant polypeptide (XTEN), wherein said factor VIII polypeptide comprises A1 domain, A2 domain, A3 domain, C1 domain, C2 domain and optionally all or a portion of B domain, and wherein said at least one XTEN is linked to said factor VIII polypeptide at (i) the C-terminus of said factor VIII polypeptide; (ii) within B domain of said factor VIII polypeptide if all or a portion of B domain is present; (iii) within the A1 domain of said factor VIII polypeptide; (iv) within the A2 domain of said factor VIII polypeptide; (v) within the A3 domain of said factor VIII polypeptide; (vi) within the C1 domain of said factor VIII polypeptide; or (vii) within the C2 domain of said factor VIII polypeptide; and wherein the XTEN is characterized in that:

[0337] a. the XTEN comprises at least 36 amino acid residues;

[0338] b. the sum of glycine (G), alanine (A), serine (S), threonine (T), glutamate (E) and proline (P) residues constitutes more than about 80% of the total amino acid residues of the XTEN;

[0339] c. the XTEN is substantially non-repetitive such that (i) the XTEN contains no three contiguous amino acids that are identical unless the amino acids are serine; (ii) at least about 80% of the XTEN sequence consists of non-overlapping sequence motifs, each of the sequence motifs comprising about 9 to about 14 amino acid residues consisting of four to six amino acids selected from glycine (G), alanine (A), serine (S), threonine (T), glutamate (E) and proline (P), wherein any two contiguous amino acid residues do not occur more than twice in each of the non-overlapping sequence motifs; or (iii) the XTEN sequence has a subsequence score of less than 10;

[0340] d. the XTEN has greater than 90% random coil formation as determined by GOR algorithm;

[0341] e. the XTEN has less than 2% alpha helices and 2% beta-sheets as determined by Chou-Fasman algorithm;

[0342] f. the XTEN lacks a predicted T-cell epitope when analyzed by TEPITOPE algorithm, wherein the TEPITOPE threshold score for said prediction by said algorithm has a threshold of −9, and wherein said fusion protein exhibits a terminal half-life that is longer than about 48 hours when administered to a subject.

Item 8. The isolated fusion protein of item 7 comprising at least another XTEN linked to said factor VIII polypeptide at the C-terminus of said factor VIII polypeptide, and within the B domain of said factor VIII polypeptide.
Item 9. The isolated fusion protein of item 7 comprising a first XTEN sequence linked to said factor VIII polypeptide at the C-terminus of said factor VIII polypeptide, and at least a second XTEN within the B domain of said factor VIII polypeptide, wherein the second XTEN is linked to the C-terminal end of about amino acid residue number 740 to about 750 and to the N-terminal end of amino acid residue numbers 1640 to about 1689 of a native FVIII sequence, wherein the cumulative length of the XTEN is at least about 100 amino acid residues.
Item 10. The isolated fusion protein of item 7 comprising at least one XTEN sequence located within B domain of said factor VIII polypeptide.
Item 11. The isolated fusion protein of item 7 comprising at least a second XTEN, wherein said at least second XTEN is linked to said factor VIII polypeptide at one or more locations selected from:

[0343] a. an insertion location from Table 5;

[0344] b. a location between any two adjacent domains of said factor VIII polypeptide, wherein said two adjacent domains are selected from the group consisting of A1 and A2 domains, A2 and B domains, B and A3 domains, A3 and C1 domains, and C1 and C2 domains;

[0345] c. the N-terminus of said factor VIII polypeptide; and

[0346] d. the C-terminus of said factor VIII polypeptide,

Item 12. The isolated fusion protein of any one of items 8-11, the second XTEN having a sequence characterized in that:

[0347] a) the XTEN comprises at least 36 amino acid residues;

[0348] b) the sum of glycine (G), alanine (A), serine (S), threonine (T), glutamate (E) and proline (P) residues constitutes more than about 80% of the total amino acid residues of the XTEN;

[0349] c) the XTEN sequence is substantially non-repetitive such that (i) the XTEN contains no three contiguous amino acids that are identical unless the amino acids are serine; (ii) at least about 80% of the XTEN sequence consists of non-overlapping sequence motifs, each of the sequence motifs comprising about 9 to about 14 amino acid residues consisting of four to six amino acids selected from glycine (G), alanine (A), serine (S), threonine (T), glutamate (E) and proline (P), wherein any two contiguous amino acid residues does not occur more than twice in each of the sequence motifs; or (iii) the XTEN sequence has a subsequence score of less than 10;

[0350] d) the XTEN has greater than 90% random coil formation as determined by GOR algorithm;

e) the XTEN has less than 2% alpha helices and 2% beta-sheets as determined by Chou-Fasman algorithm; and

[0351] f) the XTEN lacks a predicted T-cell epitope when analyzed by TEPITOPE algorithm, wherein the TEPITOPE threshold score for said prediction by said algorithm has a threshold of −9. Item 13. The isolated fusion protein of any one of preceding items, wherein the factor VIII polypeptide has at least 90% sequence identity compared to a sequence selected from Table 1, when optimally aligned. Item 14. The isolated fusion protein of any one of preceding items, wherein the factor VIII polypeptide comprises human factor VIII.

Item 15. The isolated fusion protein of any one of preceding items, wherein the factor VIII polypeptide comprises a B-domain deleted variant of human factor VIII.
Item 16. The isolated fusion protein of item 11, wherein the XTEN is linked to the C-terminus of the factor VIII polypeptide.
Item 17. The isolated fusion protein of item 11, wherein the XTEN is linked to the N-terminus of the factor VIII polypeptide.
Item 18. The isolated fusion protein of any one of the preceding items, wherein the fusion protein exhibits an apparent molecular weight factor of at least about 2.
Item 19. The isolated fusion protein of any one of items 7-18, wherein the XTEN has at least 90% sequence identity compared to a sequence of comparable length selected from any one of Table 4, Table 9, Table 10, Table 11, Table 12, and Table 13, when optimally aligned.
Item 20. The isolated fusion protein of any one of items 7-18, wherein the factor VIII polypeptide is linked to the XTEN via one or two cleavage sequences that each is cleavable by a mammalian protease selected from the group consisting of factor XIa, factor XIIa, kallikrein, factor VIIa, factor IXa, factor Xa, factor IIa (thrombin), Elastase-2, MMP-12, MMP13, MMP-17 and MMP-20, wherein cleavage at the cleavage sequence by the mammalian protease releases the factor VIII sequence from the XTEN sequence, and wherein the released factor VIII sequence exhibits an increase in procoagulant activity of at least about 30% compared to the uncleaved fusion protein.
Item 21. The isolated fusion protein of item 20, wherein the cleavage sequence(s) are cleavable by factor XIa.
Item 22. The isolated fusion protein any one of items 7-21, comprising multiple XTENs located at different locations of the factor VIII polypeptide, wherein said different locations are selected from:

[0352] a. an insertion location from Table 5;

[0353] b. a location between any two adjacent domains in the factor VIII sequence, wherein said two adjacent domains are selected from the group consisting of A1 and A2, A2 and B, B and A3, A3 and C1, and C1 and C2;

[0354] c. the N-terminus of the factor VIII sequence; and

[0355] d. the C-terminus of the factor VIII sequence;

wherein the cumulative length of the multiple XTENs is at least about 100 to about 3000 amino acid residues.
Item 23. The isolated fusion protein of any one of items 7-22, wherein said fusion protein exhibits a prolonged in vitro half-life as compared to a corresponding factor VIII polypeptide lacking said XTEN.
Item 24. The isolated fusion protein of any one of items 7-23, wherein said fusion protein exhibits a terminal half-life longer than at least 48 hours when administered to a subject.
Item 25. A pharmaceutical composition comprising the fusion protein of any one of the preceding items and a pharmaceutically acceptable carrier.
Item 26. A method of treating a coagulopathy in a subject, comprising administering to said subject a composition comprising a therapeutically effective amount of the pharmaceutical composition of item 25.
Item 27. The method of item 26, wherein after said administration, a concentration of procoagulant factor VIII is maintained at about 0.05 IU/ml or more for at least 48 hours after said administration.
Item 28. The method of item 26, wherein said coagulopathy is hemophilia A.
Item 29. A method of treating a bleeding episode in a subject, comprising administering to said subject a composition comprising a therapeutically effective amount of the pharmaceutical composition of item 25, wherein the therapeutically effective amount of the fusion protein arrests a bleeding episode for a period that is at least three-fold longer compared to the corresponding factor VIII polypeptide lacking said at least one XTEN when said corresponding factor VIII is administered to a subject at a comparable dose.
Item 30. A fusion protein used in the treatment of hemophilia A, comprising the fusion protein of any one of items 1-24.
Item 31. An isolated fusion protein comprising a polypeptide having at least 90% sequence identity compared to a sequence of comparable length selected from any one of Table 14, Table 28, Table 29 and Table 30.
Item 32. An isolated fusion protein comprising a factor VIII polypeptide and at least one extended recombinant polypeptide (XTEN), wherein said factor VIII polypeptide comprises A1 domain, A2 domain, A3 domain, and C1 domain, and wherein said at least one XTEN is linked to said factor VIII polypeptide at one or more insertion locations selected from the group consisting of:

[0356] a. the C-terminus of said factor VIII polypeptide;

[0357] b. within the A1 domain of said factor VIII polypeptide;

[0358] c. within the A2 domain of said factor VIII polypeptide;

[0359] d. within the A3 domain of said factor VIII polypeptide;

[0360] e. within the C1 domain of said factor VIII polypeptide;

[0361] f. one or more location between any two adjacent domains of said factor VIII polypeptide,

[0362] g. the N-terminus of said factor VIII polypeptide;

[0363] h. one or more location from FIG. 5;

[0364] i. one or more insertion location from Table 5; and

[0365] wherein the at least one XTEN is characterized in that:

[0366] i. the XTEN comprises at least 36 amino acid residues;

[0367] ii. the sum of glycine (G), alanine (A), serine (S), threonine (T), glutamate (E) and proline (P) residues constitutes more than about 80% of the total amino acid residues of the XTEN;

[0368] iii. the XTEN is substantially non-repetitive such that (i) the XTEN contains no three contiguous amino acids that are identical unless the amino acids are serine; (ii) at least about 80% of the XTEN sequence consists of non-overlapping sequence motifs, each of the sequence motifs comprising about 9 to about 14 amino acid residues consisting of four to six amino acids selected from glycine (G), alanine (A), serine (S), threonine (T), glutamate (E) and proline (P), wherein any two contiguous amino acid residues do not occur more than twice in each of the non-overlapping sequence motifs; or (iii) the XTEN sequence has a subsequence score of less than 10;

[0369] iv. the XTEN has greater than 90% random coil formation as determined by GOR algorithm;

[0370] v. the XTEN has less than 2% alpha helices and 2% beta-sheets as determined by Chou-Fasman algorithm; and

[0371] vi. the XTEN lacks a predicted T-cell epitope when analyzed by TEPITOPE algorithm,

[0372] wherein the TEPITOPE threshold score for said prediction by said algorithm has a threshold of −9.

Item 33. An isolated fusion protein comprising a factor VIII polypeptide and at least one extended recombinant polypeptide (XTEN), wherein said factor VIII polypeptide comprises A1 domain, A2 domain, A3 domain, and C1 domain, and wherein said at least one XTEN is linked to said factor VIII polypeptide at one or more insertion locations from table 25 and is characterized in that:

[0373] i. the XTEN comprises at least 36 amino acid residues;

[0374] ii. the sum of glycine (G), alanine (A), serine (S), threonine (T), glutamate (E) and proline (P) residues constitutes more than about 80% of the total amino acid residues of the XTEN;

[0375] iii. the XTEN is substantially non-repetitive such that (i) the XTEN contains no three contiguous amino acids that are identical unless the amino acids are serine; (ii) at least about 80% of the XTEN sequence consists of non-overlapping sequence motifs, each of the sequence motifs comprising about 9 to about 14 amino acid residues consisting of four to six amino acids selected from glycine (G), alanine (A), serine (S), threonine (T), glutamate (E) and proline (P), wherein any two contiguous amino acid residues do not occur more than twice in each of the non-overlapping sequence motifs; or (iii) the XTEN sequence has a subsequence score of less than 10;

[0376] iv. the XTEN has greater than 90% random coil formation as determined by GOR algorithm;

[0377] v. the XTEN has less than 2% alpha helices and 2% beta-sheets as determined by Chou-Fasman algorithm; and

[0378] vi. the XTEN lacks a predicted T-cell epitope when analyzed by TEPITOPE algorithm, wherein the TEPITOPE threshold score for said prediction by said algorithm has a threshold of −9.

Item 34. The fusion protein of item 32 or 33, wherein said two adjacent domains are selected from the group consisting of the A1 and A2 domains, the A2 and A3 domains, and the A3 and C1 domains.
Item 35. The fusion protein of any one of items 32 to 34, wherein said factor VIII polypeptide further comprises C2 domain.
Item 36. The fusion protein of item 35, wherein at least one XTEN is inserted within the C2 domain, N-terminus of the C2 domain, C-terminus of the C2 domain, or a combination thereof.
Item 37. The fusion protein of any one of items 32 to 36, wherein said Factor VIII comprises a full-length B domain or a partially deleted B domain.
Item 38. The fusion protein of item 37, wherein at least one XTEN is inserted within the full-length B domain or partially deleted B domain, N-terminus of the full-length B domain or partially deleted B domain, C-terminus of the full-length B domain or partially deleted B domain, or a combination thereof.
Item 39. The fusion protein of any one of items 32 to 38, wherein said A3 domain comprises an a3 acidic region or a portion thereof.
Item 40. The fusion protein of item 27, wherein at least one XTEN is inserted within the a3 acidic region or the portion thereof, N-terminus of the a3 acidic region or the portion thereof, C-terminus of the a3 acidic region or the portion thereof, or a combination thereof.
Item 41. The fusion protein of any one of items 32 to 40, further comprising one or more spacer linked to said at least one XTEN.
Item 42. The fusion protein of item 41, wherein said spacer comprises about 1 to about 50 amino acid residues that optionally includes a cleavage sequence or amino acids compatible with restriction sites, wherein for each occurrence, if there is any, the sequence of the spacer is the same or different.
Item 43. An isolated fusion protein comprising a structure of formula (A):

(XTEN)v-(S)a-(A1)-(S)b-(XTEN)w-(S)b-(A2)-(S)c-(XTEN)x-(S)c-(A3)-(S)d-(XTEN)y-(S)d-(C1)-(S)e-(XTEN)z (A)

[0379] wherein independently for each occurrence,

[0380] u) A1 is an A1 domain of FVIII;

[0381] v) A2 is an A2 domain of FVIII;

[0382] w) A3 is an A3 domain of FVIII;

[0383] x) C1 is a C1 domain of FVIII;

[0384] y) S is a spacer sequence having between 1 to about 50 amino acid residues that optionally includes a cleavage sequence or amino acids compatible with restrictions sites, wherein for each occurrence, if there is any, the sequence of the spacer is the same or different;

[0385] wherein

[0386] (i) a is either 0 or 1;

[0387] (ii) b is either 0 or 1;

[0388] (iii) c is either 0 or 1;

[0389] (iv) d is either 0 or 1;

[0390] (v) e is either 0 or 1;

[0391] (vi) v is either 0 or 1;

[0392] (vii) w is 0 or 1;

[0393] (viii) x is either 0 or 1;

[0394] (ix) y is either 0 or 1;

[0395] (x) z is either 0 or 1,

with the proviso that v+w+x+y+z>1,
wherein said XTEN is characterized in that:

[0396] (1). the XTEN comprises at least 36 amino acid residues;

[0397] (2). the sum of glycine (G), alanine (A), serine (S), threonine (T), glutamate (E) and proline (P) residues constitutes more than about 80% of the total amino acid residues of the XTEN;

[0398] (3). the XTEN is substantially non-repetitive such that (i) the XTEN contains no three contiguous amino acids that are identical unless the amino acids are serine; (ii) at least about 80% of the XTEN sequence consists of non-overlapping sequence motifs, each of the sequence motifs comprising about 9 to about 14 amino acid residues consisting of four to six amino acids selected from glycine (G), alanine (A), serine (S), threonine (T), glutamate (E) and proline (P), wherein any two contiguous amino acid residues do not occur more than twice in each of the non-overlapping sequence motifs; or (iii) the XTEN sequence has a subsequence score of less than 10;

[0399] (4). the XTEN has greater than 90% random coil formation as determined by GOR algorithm;

[0400] (5). the XTEN has less than 2% alpha helices and 2% beta-sheets as determined by Chou-Fasman algorithm; and

[0401] (6). the XTEN lacks a predicted T-cell epitope when analyzed by TEPITOPE algorithm, wherein the TEPITOPE threshold score for said prediction by said algorithm has a threshold of −9.

Item 44. The fusion protein of item 43, wherein said factor VIII polypeptide further comprises C2 domain.
Item 45. The fusion protein of item 44, wherein at least one XTEN is inserted within the C2 domain, N-terminus of the C2 domain, C-terminus of the C2 domain, or a combination thereof.
Item 46. The fusion protein of any one of items 43 to 45, wherein said Factor VIII comprises a full or a partially deleted B domain anywhere between the A2 and the A3.
Item 47. The fusion protein of item 46, wherein at least one XTEN is inserted within the full-length B domain or partially deleted B domain, N-terminus of the full-length B domain or partially deleted B domain, C-terminus of the full-length B domain or partially deleted B domain, or a combination thereof.
Item 48. The fusion protein of any one of items 43 to 47, wherein said A3 domain comprises an a3 acidic region or a portion thereof.
Item 49. The fusion protein of item 48, wherein at least one XTEN is inserted within the a3 acidic region or the portion thereof, N-terminus of the a3 acidic region or the portion thereof, C-terminus of the a3 acidic region or the portion thereof, or a combination thereof.
Item 50. The fusion protein of item 44, wherein at least one XTEN is further inserted within the A1, the A2, the A3, the C1, the C2, or a combination of two or more thereof.
Item 51. The fusion protein of any one of items 37-38 and 46-47, wherein said B domain comprises amino acid residues 741 to 743 of mature FVIII and/or amino acid residues 1638 to 1648 of mature FVIII.
Item 52. The fusion protein of any one of items 32 to 51, wherein said at least one XTEN is inserted right after Arginine at residue 1648 of mature FVIII.
Item 53. The fusion protein of any one of items 32 to 52, wherein said at least one XTEN is inserted in one or more thrombin cleavage site selected from the group consisting of amino acid residues 372 of FVIII, 740 of FVIII, and 1689 of FVIII.
Item 54. The fusion protein of any one of items 43 to 53, wherein the sum of v, w, x, y, and z, equals to 2, 3, 4, 5, 6, 7, 8, 9, or 10.
Item 55. The fusion protein of any one of items 32 to 54, wherein said factor VIII polypeptide comprises a heavy chain and a light chain, wherein said heavy chain comprises the A1 domain and the A2 domain, and said light chain comprises the A3 domain and the C1 domain.
Item 56. The fusion protein of item 55, wherein said heavy chain further comprises a partially deleted B domain and/or the light chain further comprises a partially deleted B domain.
Item 57. The fusion protein of any one of items 42-56, wherein the optional cleavage sequence(s) are cleavable by a mammalian protease selected from the group consisting of factor XIa, factor XIIa, kallikrein, factor VIIa, factor IXa, factor Xa, factor IIa (thrombin), Elastase-2, MMP-12, MMP13, MMP-17 and MMP-20, wherein upon cleavage of the cleavage sequences, at least one XTEN is cleaved from the fusion protein and the cleaved fusion protein exhibits an increase in procoagulant activity of at least about 30% compared to the uncleaved fusion protein.
Item 58. The fusion protein of any one of items 32 to 57, wherein one or more of said at least one XTEN is 36 amino acids, 42 amino acids, 144 amino acids, 288 amino acids, 576 amino acids, or 864 amino acids in length.
Item 59. The fusion protein of any one of items 32 to 57, wherein one or more of said at least one XTEN is selected from the group consisting of: XTEN_AE42, XTEN_AE864, XTEN_AE576, XTEN_AE288, XTEN_AE144, XTEN_AG864, XTEN_AG576, XTEN_AG288, and XTEN_AG144.
Item 60. The fusion protein of any one of items 32 to 59, which comprises at least two XTENs, wherein the cumulative length of the XTENs is between about 100 to about 3000 amino acid residues.
Item 61. The fusion protein of any one of items 32 to 60, wherein said fusion protein exhibits a prolonged in vitro half-life as compared to a corresponding factor VIII polypeptide lacking said XTEN.
Item 62. The fusion protein of any one of items 32-61, wherein said fusion protein exhibits a terminal half-life longer than at least 48 hours when administered to a subject.
Item 63. The fusion protein of any one of items 32 to 62, wherein a first XTEN of said at least one XTEN is linked to said factor VIII polypeptide at the C-terminus of said factor VIII polypeptide, and a second XTEN of said at least one XTEN is linked within the B domain of said factor VIII polypeptide.
Item 64. The fusion protein of item 63, wherein said second XTEN is linked between amino acid residue 743 and amino acid residue 1638 of mature FVIII.
Item 65. The fusion protein of item 63 or 64, wherein said first XTEN or said second XTEN has 36 amino acids, 42 amino acids, 144 amino acids, 288 amino acids, 576 amino acids, or 864 amino acids in length.
Item 66. The fusion protein of any one of items 63 to 65, wherein said first XTEN or said second XTEN is selected from the group consisting of: XTEN_AE42_{—}4, XTEN_AE864, XTEN_AE576, XTEN_AE288, XTEN_AE144, XTEN_AG864, XTEN_AG576, XTEN_AG288, and XTEN_AG144.
Item 67. The fusion protein of any one of the preceding items, wherein the cumulative length of the XTENs is at least about 100 amino acid residues.
Item 68. The fusion protein of any one of items 32 to 67, further comprising one or more XTEN linked to the factor VIII polypeptide at one or more locations selected from the group consisting of:

[0402] a. one or more insertion location from Table 5 or Table 25;

[0403] b. one or more insertion location from FIG. 5;

[0404] c. within the B domain of said factor VIII polypeptide;

[0405] d. within the A1 domain of said factor VIII polypeptide;

[0406] e. within the A2 domain of said factor VIII polypeptide;

[0407] f. within the a3 acidic region of said factor VIII polypeptide;

[0408] g. within the A3 domain of said factor VIII polypeptide;

[0409] h. within the C1 domain of said factor VIII polypeptide;

[0410] i. within the C2 domain of said factor VIII polypeptide;

[0411] j. one or more insertion location between any two adjacent domains of said factor VIII polypeptide, wherein said two adjacent domains are selected from the group consisting of A1 and A2 domains, A2 and B domains, B domain and a3 region, A2 domain and a3 region when B domain is completely deleted, a3 region and A3 domains, A3 and C1 domains, and C1 and C2 domains;

[0412] k. the N-terminus of said factor VIII polypeptide; and

[0413] l. the C-terminus of said factor VIII polypeptide.

Item 69. The fusion protein of any one of items 32 to 67, further comprising one or more XTEN linked to the factor VIII polypeptide at one or more locations from Table 25.
Item 70. The fusion protein item 68 or 69, wherein the one or more XTEN is characterized in that:

[0414] a. the XTEN comprises at least 36 amino acid residues;

[0415] b. the sum of glycine (G), alanine (A), serine (S), threonine (T), glutamate (E) and proline (P) residues constitutes more than about 80% of the total amino acid residues of the XTEN;

[0416] c. the XTEN sequence is substantially non-repetitive such that (i) the XTEN contains no three contiguous amino acids that are identical unless the amino acids are serine; (ii) at least about 80% of the XTEN sequence consists of non-overlapping sequence motifs, each of the sequence motifs comprising about 9 to about 14 amino acid residues consisting of four to six amino acids selected from glycine (G), alanine (A), serine (S), threonine (T), glutamate (E) and proline (P), wherein any two contiguous amino acid residues does not occur more than twice in each of the sequence motifs; or (iii) the XTEN sequence has a subsequence score of less than 10;

[0417] d. the XTEN has greater than 90% random coil formation as determined by GOR algorithm;

[0418] e. the XTEN has less than 2% alpha helices and 2% beta-sheets as determined by Chou-Fasman algorithm; and

[0419] f. the XTEN lacks a predicted T-cell epitope when analyzed by TEPITOPE algorithm, wherein the TEPITOPE threshold score for said prediction by said algorithm has a threshold of −9.

Item 71. The fusion protein of any one of items 68 to 70, wherein said one or more XTEN has 36 amino acids, 42 amino acids, 144 amino acids, 288 amino acids, 576 amino acids, or 864 amino acids in length.
Item 72. The fusion protein of any one of items 68 to 70, wherein said one or more XTEN is selected from the group consisting of: XTEN_AE42_{—}4, XTEN_AE864, XTEN_AE576, XTEN_AE288, XTEN_AE144, XTEN_AG864, XTEN_AG576, XTEN_AG288, and XTEN_AG144.
Item 73. The fusion protein of any one of the preceding items, wherein the factor VIII polypeptide has at least 90% sequence identity compared to a sequence selected from Table 1 or Table 31, when optimally aligned.
Item 74. The fusion protein of any one of the preceding items, wherein the factor VIII polypeptide comprises human factor VIII.
Item 75. The fusion protein of any one of the preceding items, wherein said at least one XTEN is linked to the C-terminus of the factor VIII polypeptide.
Item 76. The fusion protein of the any one of the preceding item, wherein said at least one XTEN is linked to the N-terminus of the factor VIII polypeptide.
Item 77. The fusion protein of the any one of the preceding items, wherein said at least one XTEN is linked to an insertion location from Table 25.
Item 78. The fusion protein of any one of the preceding items, wherein the fusion protein exhibits an apparent molecular weight factor of at least about 2.
Item 79. The fusion protein of any one of items the preceding items, wherein the XTEN has at least 90% sequence identity compared to a sequence of comparable length selected from any one of Table 4, Table 9, Table 10, Table 11, Table 12, and Table 13, when optimally aligned.
Item 80. The fusion protein of item 57, wherein the cleavage sequence(s) are cleavable by factor XIa.
Item 81. A pharmaceutical composition comprising the fusion protein of any one of the preceding items and a pharmaceutically acceptable carrier.
Item 82. A method of treating a coagulopathy in a subject, comprising administering to said subject a composition comprising a therapeutically effective amount of the pharmaceutical composition of item 81.
Item 83. The method of item 82, wherein after said administration, a concentration of procoagulant factor VIII is maintained at about 0.05 IU/ml or more for at least 48 hours after said administration.
Item 84. The method of item 82 or 83, wherein said coagulopathy is hemophilia A.
Item 85. A method of treating a bleeding episode in a subject, comprising administering to said subject a composition comprising a therapeutically effective amount of the pharmaceutical composition of item 82, wherein the therapeutically effective amount of the fusion protein arrests a bleeding episode for a period that is at least three-fold longer compared to the corresponding factor VIII polypeptide lacking said at least one XTEN when said corresponding factor VIII is administered to a subject at a comparable dose. Item 86. A fusion protein used in the treatment of hemophilia A, comprising the fusion protein of any one of items 1-85.

### V). Properties of the CFXTEN Compositions of the Invention

[0420] (a) Pharmacokinetic Properties of CFXTEN

[0421] In another aspect, the present invention provides CFXTEN fusion proteins and pharmaceutical compositions comprising CFXTEN with enhanced pharmacokinetics compared to FVIII not linked to XTEN. The pharmacokinetic properties of a FVIII that can be enhanced by linking a given XTEN to the FVIII include, but are not limited to, terminal half-life, area under the curve (AUC), Cₘₐₓ, volume of distribution, maintaining the biologically active CFXTEN above a minimum effective blood unit concentration for a longer period of time compared to the FVIII not linked to XTEN, and bioavailability, as well as other properties that permit less frequent dosing or a longer-lived pharmacologic effect compared to FVIII not linked to XTEN Enhancement of one or more of these properties can resulting benefits in the treatment of factor VIII-related disorders, and related conditions.

[0422] Exogenously administered factor VIII has been reported to have a terminal half-life in humans of approximately 12-14 hours when complexed with normal von Willebrand factor protein, whereas in the absence of von Willebrand factor, the half-life of factor VIII is reduced to 2 hours (Tuddenham E G, et al., Br J. Haematol. (1982) 52(2):259-267; Bjorkman, S., et al. Clin Pharmacokinet. (2001) 40:815). As a result of the enhanced properties conferred by XTEN, the CFXTEN, when used at the dose and dose regimen determined to be appropriate for the composition by the methods described herein, can achieve a circulating concentration resulting in a desired procoagulant or clinical effect for an extended period of time compared to a comparable dose of the FVIII not linked to XTEN. As used herein, a “comparable dose” means a dose with an equivalent moles/kg or International Units/kg (IU/kg) for the composition that is administered to a subject. It will be understood in the art that a “comparable dosage” of CFXTEN fusion protein would represent a greater weight of agent but would have essentially the same IUs or mole-equivalents of FVIII in the dose of the fusion protein administered.

[0423] An international unit (“IU”) of factor VIII is defined in the art as the coagulant activity present in 1 ml of normal human plasma. A normal, non-hemophilic individual human is expected to have about 100 IU/dL factor VIII activity. In hemophilia A, the doses required to treat are dependent on the condition. For minor bleeding, doses of native or recombinant factor VIII of 20 to 40 IU/kg are typically administered, as necessary. For moderate bleeding, doses of 30 to 60 IU/kg are administered as necessary, and for major bleeding, doses of 80 to 100 IU/kg may be required, with repeat doses of 20 to 25 IU/kg given every 8 to 12 hours until the bleeding is resolved. For prophylaxis against bleeding in patients with severe hemophilia A, the usual doses of native or recombinant FVIII preparations are 20 to 40 IU/kg body weight at intervals of about 2 to 3 days. A standard equation for estimating an appropriate dose of a composition comprising FVIII is:

Required units=body weight (kg)×desired factor VIII rise (IU/dL or % of normal)×0.5 (IU/kg per IU/dL).

[0424] For the inventive compositions, CFXTEN with a longer terminal half-life are generally preferred, so as to improve patient convenience, to increase the interval between doses and to reduce the amount of drug required to achieve a sustained effect. Using CFXTEN from the embodiments hereinabove described, the administration of the fusion protein results in an improvement in at least one of the parameters disclosed herein as being useful for assessing the subject diseases, conditions or disorders (e.g., resolution of a bleeding event, achieving or maintaining a minimum blood concentration in IU/ml, such as 0.01-0.05 to 0.05 to 0.4 IU/ml, and/or achieving a clotting assay result within 30% of normal) using a lower IU dose of fusion protein compared to the corresponding FVIII component not linked to the XTEN and administered at a comparable IU dose or dose regimen to a subject. In one embodiment, the total dose in IUs administered to achieve and/or maintain the improvement in at least one parameter is at least about three-fold lower, or at least about four-fold, or at least about five-fold, or at least about six-fold, or at least about eight-fold, or at least about 10-fold lower compared to the corresponding FVIII component not linked to the XTEN.

[0425] As described more fully in the Examples pertaining to pharmacokinetic characteristics of fusion proteins comprising XTEN, it was observed that increasing the length of the XTEN sequence confers a disproportionate increase in the terminal half-life of a fusion protein comprising the XTEN. Accordingly, the invention provides CFXTEN fusion proteins and pharmaceutical compositions comprising CFXTEN wherein the CFXTEN exhibits a targeted half-life for the CFXTEN composition administered to a subject. In some embodiments, the invention provides monomeric CFXTEN fusion proteins comprising one or more XTEN wherein the XTEN is selected to confer an increase in the terminal half-life for the CFXTEN administered to a subject, compared to the corresponding FVIII not linked to the XTEN and administered at a comparable dose, wherein the increase is at least about two-fold longer, or at least about three-fold, or at least about four-fold, or at least about five-fold, or at least about six-fold, or at least about seven-fold, or at least about eight-fold, or at least about nine-fold, or at least about ten-fold, or at least about 15-fold, or at least a 20-fold, or at least a 40-fold or greater an increase in terminal half-life compared to the FVIII not linked to the XTEN. In another embodiment, the administration of a therapeutically effective amount of CFXTEN or a pharmaceutical compositions comprising CFXTEN to a subject in need thereof results in a terminal half-life that is at least 12 h greater, or at least about 24 h greater, or at least about 48 h greater, or at least about 96 h greater, or at least about 144 h greater, or at least about 7 days greater, or at least about 14 days greater, or at least about 21 days greater compared to a comparable dose of FVIII not linked to XTEN. In another embodiment, administration of a therapeutically effective dose of a CFXTEN fusion protein to a subject in need thereof can result in a gain in time between consecutive doses necessary to maintain a therapeutically effective blood level of the fusion protein of at least 0.01-0.05 to about 0.1-0.4 IU/ml of at least 48 h, or at least 72 h, or at least about 96 h, or at least about 120 h, or at least about 7 days, or at least about 14 days, or at least about 21 days between consecutive doses compared to a FVIII not linked to XTEN and administered at a comparable dose. It will be understood in the art that the time between consecutive doses to maintain a “therapeutically effective blood level” will vary greatly depending on the physiologic state of the subject, and it will be appreciated that a patient with hemophilia A undergoing surgery or suffering severe trauma will require more frequent dosing of a factor VIII preparation compared to a patient receiving the same preparation for conventional prophylaxis. The foregoing notwithstanding, it is believed that the CFXTEN of the present invention permit less frequent dosing, as described above, compared to a FVIII not linked to XTEN.

[0426] In one embodiment, the present invention provides CFXTEN fusion proteins and pharmaceutical compositions comprising CFXTEN that exhibit, when administered to a subject in need thereof, an increase in AUC of at least about 50%, or at least about 60%, or at least about 70%, or at least about 80%, or at least about 90%, or at least about a 100%, or at least about 150%, or at least about 200%, or at least about 300%, or at least about 500%, or at least about 1000%, or at least about a 2000% compared to the corresponding FVIII not linked to the XTEN and administered to a subject at a comparable dose. The pharmacokinetic parameters of a CFXTEN can be determined by standard methods involving dosing, the taking of blood samples at times intervals, and the assaying of the protein using ELISA, HPLC, radioassay, clotting assays, the assays of Table 27, or other methods known in the art or as described herein, followed by standard calculations of the data to derive the half-life and other PK parameters.

[0427] The enhanced PK parameters allow for reduced dosing of the subject compositions, compared to FVIII not linked to XTEN, particularly for those subjects receiving doses for routine prophylaxis. In one embodiment, a smaller IU amount of about two-fold less, or about three-fold less, or about four-fold less, or about five-fold less, or about six-fold less, or about eight-fold less, or about 10-fold less or greater of the fusion protein is administered in comparison to the corresponding FVIII not linked to the XTEN under a dose regimen needed to maintain hemostasis or a minimum effective blood concentration (e.g., 0.01-0.5 to about 0.1-0.4 IU/ml), and the fusion protein achieves a comparable area under the curve as the corresponding IU amount of the FVIII not linked to the XTEN. In another embodiment, the CFXTEN fusion protein or a pharmaceutical compositions comprising CFXTEN requires less frequent administration for routine prophylaxis of a hemophilia A subject, wherein the dose is administered about every four days, about every seven days, about every 10 days, about every 14 days, about every 21 days, or about monthly of the fusion protein administered to a subject, and the fusion protein achieves a comparable area under the curve as the corresponding FVIII not linked to the XTEN. In yet other embodiments, an accumulative smaller IU amount of about 5%, or about 10%, or about 20%, or about 40%, or about 50%, or about 60%, or about 70%, or about 80%, or about 90% less of the fusion protein is administered to a subject in comparison to the corresponding IU amount of the FVIII not linked to the XTEN under a dose regimen needed to maintain hemostasis or a minimum effective blood concentration (e.g., 0.5 IU/ml), yet the fusion protein achieves at least a comparable area under the curve as the corresponding FVIII not linked to the XTEN. The accumulative smaller IU amount is measure for a period of at least about one week, or about 14 days, or about 21 days, or about one month.

[0428] In one aspect, the invention provides CFXTEN compositions designed to reduce active clearance of the fusion protein, thereby increasing the terminal half-life of CFXTEN administered to a subject, while still retaining procoagulant activity. It is believed that the CFXTEN of the present invention have comparatively higher and/or sustained activity achieved by reduced active clearance of the molecule by the addition of unstructured XTEN to the FVIII coagulation factor. The clearance mechanisms to remove FVIII from the circulation have yet to be fully elucidated. Uptake, elimination, and inactivation of coagulation proteins can occur in the circulatory system as well as in the extravascular space. Coagulation factors are complex proteins that interact with a large number of other proteins, lipids, and receptors, and many of these interactions can contribute to the elimination of CFs from the circulation. Factor VIII and von Willebrand factor (VWF) circulate in the blood as a tight, non-covalently linked complex in which VWF serves as a carrier that likely contributes to the protection of FVIII from active cleavage mechanisms.

[0429] For example: (i) VWF stabilizes the heterodimeric structure of FVIII; (ii) VWF protects FVIII from proteolytic degradation by phospholipid-binding proteases like activated protein C and activated FX (FXa); (iii) VWF interferes with binding of FVIII to negatively charged phospholipid surfaces exposed within activated platelets; (iv) VWF inhibits binding of FVIII to activated FIX (FIXa), thereby denying FVIII access to the FX-activating complex; and (v) VWF prevents the cellular uptake of FVIII (Lenting, P. J., et al., J Thrombosis and Haemostasis (2007) 5(7):1353-1360). In addition, LDL receptor-related protein (LRP1, also known as α2-macrogobulin receptor or CD91) has been identified as a candidate clearance receptor for FVIII, with LRP1 binding sites identified on both chains of the heterodimer form of FVIII (Lenting P J, et al., J Biol Chem (1999) 274: 23734-23739; Saenko E L, et al., J Biol Chem (1999) 274: 37685-37692). LRPs are involved in the clearance of a diversity of ligands including proteases, inhibitors of the Kunitz type, protease serpin complexes, lipases and lipoproteins (Narita, et al., Blood (1998) 2:555-560). It has been shown that the light chain, but not the heavy chain, of factor VIII binds to surface-exposed LRP1 receptor protein (Lentig et al. (J Biol Chem (1999) 274(34):23734-23739; and U.S. Pat. No. 6,919,311), which suggests that LRP1 may play an essential role in the active clearance of proteins like FVIII. While the VWF-FVIII interaction is of high affinity (<1 nM), the complex is nevertheless in a dynamic equilibrium, such that a small but significant portion of the FVIII molecules (5-8%) circulate as a free protein (Leyte A, et al., Biochem J (1989) 257: 679-683; Noe D A. Haemostasis (1996) 26: 289-303). As such, a portion of native FVIII is unprotected by VWF, allowing active clearance mechanisms to remove the unprotected FVIII from the circulation.

[0430] In one embodiment, the invention provides CFXTEN that associate with VWF but have enhanced protection from active clearance receptors conferred by the incorporation of two more XTEN at one or more locations within the FVIII molecule (e.g., locations selected from Table 5 or Table 25 or FIG. 7), wherein the XTEN interfere with the interaction of the resulting CFXTEN with those clearance receptors with the result that the pharmacokinetic properties of the CFXTEN is enhanced compared to the corresponding FVIII not linked to XTEN. In another embodiment, the invention provides CFXTEN that have reduced or no binding affinity with VWF, but are nevertheless configured to have enhanced protection from active clearance receptors conferred by the incorporation of XTEN at one or more locations within the FVIII molecule, wherein the XTEN interfere with the interaction of factor VIII with those receptors. The invention provides a method wherein the CFXTEN fusion proteins created with the multiple insertions are evaluated for inhibition of binding to clearance receptors, compared to FVIII not linked to XTEN, using in vitro binding assays or in vivo pharmacokinetic models described herein or other assays known in the art, and selecting those that demonstrate reduced binding yet retain procoagulant FVIII activity. In addition, the foregoing fusion proteins can also incorporate longer XTEN lengths serving as carriers in order to achieve pharmacokinetic properties that are further enhanced. Table 5, Table 25 and FIG. 7 provide non-limiting examples of XTEN insertion points within the factor VIII sequence. Using such insertion points, the invention contemplates CFXTEN that have combinations of configurations with multiple inserted XTEN to further increase the protection against active clearance mechanisms and, hence, increase the terminal half-life of the CFXTEN. Not to be bound by a particular theory, the XTEN of the CFXTEN compositions with high net charge (e.g., CFXTEN comprising AE family XTEN) are expected, as described above, to have less non-specific interactions with various negatively-charged surfaces such as blood vessels, tissues, or various receptors, which would further contribute to reduced active clearance. Conversely, the XTEN of the CFXTEN compositions with a low (or no) net charge (e.g., CFXTEN comprising AG family XTEN) are expected to have a higher degree of interaction with surfaces that, while contributing to active clearance, can potentiate the activity of the associated coagulation factor, given the known contribution of cell (e.g., platelets) and vascular surfaces to the coagulation process and the intensity of activation of coagulation factors (Zhou, R., et al., Biomaterials (2005) 26(16):2965-2973; London, F., et al. Biochemistry (2000) 39(32):9850-9858). The invention, in part, takes advantage of the fact that certain ligands wherein reduced binding to a clearance receptor, either as a result of a decreased on-rate or an increased off-rate, may be effected by the obstruction of either the N- or C-terminus and using that terminus as the linkage to another polypeptide of the composition, whether another molecule of a CF, an XTEN, or a spacer sequence results in the reduced binding. The choice of the particular configuration of the CFXTEN fusion protein can be tested by methods disclosed herein to confirm those configurations that reduce the degree of binding to a clearance receptor such that a reduced rate of active clearance is achieved. In one embodiment, the CFXTEN comprises a FVIII-XTEN sequence that has one or more XTEN inserted at locations selected from Table 5, Table 25, or FIG. 7 wherein the terminal half-life of the CFXTEN is increased at least about two-fold, or at least about three-fold, or at least about four-fold, or at least about five-fold, or at least about six-fold, or at least about eight-fold, or at least about ten-fold, or at least about twenty-fold compared to a FVIII not linked to an XTEN. In another embodiment, the CFXTEN comprises a FVIII-XTEN sequence that has a first and at least a second XTEN inserted at a first and second location selected from Table 5, Table 25, or FIG. 7 wherein the terminal half-life of the CFXTEN is increased at least about two-fold, or at least about three-fold, or at least about four-fold, or at least about five-fold, or at least about six-fold, or at least about eight-fold, or at least about ten-fold, or at least about twenty-fold compared to a FVIII not linked to an XTEN. In yet another embodiment, the CFXTEN comprises a FVIII-XTEN sequence that incorporates multiple XTEN sequences using multiple insertion locations selected from Table 5, Table 25 or FIG. 7 wherein the terminal half-life of the CFXTEN is increased at least about two-fold, or at least about three-fold, or at least about four-fold, or at least about five-fold, or at least about six-fold, or at least about eight-fold, or at least about ten-fold, or at least about twenty-fold compared to a FVIII not linked to an XTEN. In the foregoing embodiments hereinabove described in this paragraph, the XTEN incorporated into the CFXTEN configurations can be identical or they can be different, and can have at least about 80%, or 90%, or 91%, or 92%, or 93%, or 94%, or 95%, or 96%, or 97%, or 98%, or 99%, sequence identity to a sequence from any one of Tables 3, 4, and 9-13, and can optionally include one or more cleavage sequences from Table 7, facilitating release of one or more of the XTEN from the CFXTEN fusion protein.

[0431] In one embodiment, the invention provides CFXTEN that enhance the pharmacokinetics of the fusion protein by linking one or more XTEN to the FVIII component of the fusion protein wherein the fusion protein has an increase in apparent molecular weight factor of at least about two-fold, or at least about three-fold, or at least about four-fold, or at least about five-fold, or at least about six-fold, or at least about seven-fold, or at least about eight-fold, or at least about ten-fold, or at least about twelve-fold, or at least about fifteen-fold, and wherein the terminal half-life of the CFXTEN when administered to a subject is increased at least about two-fold, or at least about four-fold, or at least about eight-fold, or at least about 10-fold or more compared to the corresponding FVIII not linked to XTEN. In the foregoing embodiment, wherein at least two XTEN molecules are incorporated into the CFXTEN, the XTEN can be identical or they can be of a different sequence composition, net charge, or length. The XTEN can have at least about 80%, or 90%, or 91%, or 92%, or 93%, or 94%, or 95%, or 96%, or 97%, or 98%, or 99%, sequence identity to a sequence from any one of Tables 3, 4, and 9-13, and can optionally include one or more cleavage sequences from Table 7, facilitating release of one or more of the XTEN from the CFXTEN fusion protein.

[0432] Thus, the invention provides CFXTEN compositions in which the degree of activity, bioavailability, half-life or physicochemical characteristic of the fusion protein can be tailored by the selection and placement of the type and length of the XTEN in the CFXTEN compositions. Accordingly, the invention contemplates compositions in which a FVIII from Table 1 or Table 31 and XTEN or XTEN fragment from any one of Tables 3, 4, or 9-13 are produced, for example, in a configuration selected from any one of formulae I-VIII such that the construct has the desired property.

[0433] The invention provides methods to produce the CFXTEN compositions that can maintain the FVIII component at therapeutic levels in a subject in need thereof for at least a two-fold, or at least a three-fold, or at least a four-fold, or at least a five-fold greater period of time compared to comparable dosages of the corresponding FVIII not linked to XTEN. In one embodiment of the method, the subject is receiving routine prophylaxis to prevent bleeding episodes. In another embodiment of the method, the subject is receiving treatment for a bleeding episode. In another embodiment of the method, the subject is receiving treatment to raise the circulating blood concentration of procoagulant FVIII above 1%, or above 1-5%, or above 5-40% relative to FVIII concentrations in normal plasma. “Procoagulant” as used herein has its general meaning in the art and generally refers to an activity that promotes clot formation, either in an in vitro assay or in vivo. The method to produce the compositions that can maintain the FVIII component at therapeutic levels includes the steps of selecting one or more XTEN appropriate for conjugation to a FVIII to provide the desired pharmacokinetic properties in view of a given dose and dose regimen, creating a gene construct that encodes the CFXTEN in one of the configurations disclosed herein, transforming an appropriate host cell with an expression vector comprising the encoding gene, expressing the fusion protein under suitable culture conditions, recovering the CFXTEN, administration of the CFXTEN to a mammal followed by assays to verify the pharmacokinetic properties and the activity of the CFXTEN fusion protein (e.g., the ability to maintain hemostasis or serve as a procoagulant) and the safety of the administered composition. Those compositions exhibiting the desired properties are selected for further use. CFXTEN created by the methods provided herein can result in increased efficacy of the administered composition by, amongst other properties, maintaining the circulating concentrations of the procoagulant FVIII component at therapeutic levels for an enhanced period of time.

[0434] The invention provides methods to assay the CFXTEN fusion proteins of differing composition or configuration in order to provide CFXTEN with the desired degree of procoagulant and therapeutic activity and pharmacokinetic properties, as well as a sufficient safety profile. Specific in vivo and ex vivo biological assays are used to assess the activity and functional characteristics of each configured CFXTEN and/or FVIII component to be incorporated into CFXTEN, including but not limited to the assays of the Examples, those assays of Table 27, as well as the following assays or other such assays known in the art for assaying the properties and effects of FVIII. Functional assays can be conducted that allow determination of coagulation activity, such as one-stage clotting assay and two-stage clotting assay (Barrowcliffe T W, Semin Thromb Hemost. (2002) 28(3):247-256), activated partial prothrombin (aPTT) assays (Belaaouaj A A et al., J. Biol. Chem. (2000) 275:27123-8; Diaz-Collier J A. Haemost (1994) 71:339-46), chromogenic FVIII assays (Lethagen, S., et al., Scandinavian J Haematology (1986) 37:448-453), or animal model pharmacodynamic assays including bleeding time or thrombelastography (TEG or ROTEM), among others. Other assays include determining the binding affinity of a CFXTEN for the target substrate using binding or competitive binding assays, such as Biacore assays with chip-bound receptors or binding proteins or ELISA assays, as described in U.S. Pat. No. 5,534,617, assays described in the Examples herein, radio-receptor assays, or other assays known in the art. The foregoing assays can also be used to assess FVIII sequence variants (assayed as single components or as CFXTEN fusion proteins) and can be compared to the native FVIII to determine whether they have the same degree of procoagulant activity as the native CF, or some fraction thereof such that they are suitable for inclusion in CFXTEN; e.g., at least about 30%, or at least about 40%, or at least about 50%, or at least about 60%, or at least about 70%, or at least about 80%, or at least about 90% of the activity compared to the native FVIII.

[0435] Dose optimization is important for all drugs. A therapeutically effective dose or amount of the CFXTEN varies according to factors such as the disease state, age, sex, and weight of the individual, and the ability of the administered fusion protein to elicit a desired response in the individual. For example, a standardized single dose of FVIII for all patients presenting with diverse bleeding conditions or abnormal clinical parameters (e.g., neutralizing antibodies) may not always be effective. A consideration of these factors is well within the purview of the ordinarily skilled clinician for the purpose of determining the therapeutically or pharmacologically effective amount of the CFXTEN and the appropriated dosing schedule, versus that amount that would result in insufficient potency such that clinical improvement is not achieved.

[0436] The invention provides methods to establish a dose regimen for the CFXTEN pharmaceutical compositions of the invention. The methods include administration of consecutive doses of a therapeutically effective amount of the CFXTEN pharmaceutical composition using variable periods of time between doses to determine that interval of dosing sufficient to achieve and/or maintain the desired parameter, blood level or clinical effect; such consecutive doses of a therapeutically effective amount at the effective interval establishes the therapeutically effective dose regimen for the CFXTEN for a factor VIII-related disease state or condition. A prophylactically effective amount refers to an amount of CFXTEN required for the period of time necessary to prevent a physiologic or clinical result or event; e.g., delayed onset of a bleeding episode or maintaining blood concentrations of procoagulant FVIII or equivalent above a threshold level (e.g., 1-5% to 5-40% of normal). In the methods of treatment, the dosage amount of the CFXTEN that is administered to a subject ranges from about 5 to 300 IU/kg/dose, or from about 10 to 100 IU/kg/dose, or from about 20 to about 65 IU/kg/dose, or from about 20 to about 40 IU/kg/dose for a subject. A suitable dosage may also depend on other factors that may influence the response to the drug; e.g., bleeding episodes generally requiring higher doses at more frequent intervals compared to prophylaxis.

[0437] In some embodiments, the method comprises administering a therapeutically-effective amount of a pharmaceutical composition comprising a CFXTEN fusion protein composition comprising FVIII linked to one or more XTEN sequences and at least one pharmaceutically acceptable carrier to a subject in need thereof, wherein the administration results in a greater improvement in at least one of the disclosed parameters or physiologic conditions, or results in a more favorable clinical outcome mediated by the FVIII component of the CFXTEN compared to the effect on the parameter, condition or clinical outcome mediated by administration of a pharmaceutical composition comprising a FVIII not linked to XTEN and administered at a comparable dose. In one embodiment of the foregoing, the improvement is achieved by administration of the CFXTEN pharmaceutical composition at a dose that achieves a circulating concentration of procoagulant FVIII (or equivalent) above a threshold level (e.g., 1-5% to 5-40% of normal), thereby establishing the therapeutically effective dose. In another embodiment of the foregoing, the improvement is achieved by administration of multiple consecutive doses of the CFXTEN pharmaceutical composition using a therapeutically effective dose regimen that maintains a circulating concentration of procoagulant FVIII (or equivalent) above a threshold level (e.g., 1-5% to 5-40% of normal) for the length of the dosing period.

[0438] In many cases, the therapeutic levels for FVIII in subjects of different ages or degree of disease have been established and are available in published literature or are stated on the drug label for approved products containing the FVIII. For example, the Subcommittee on Factor VIII and Factor IX of the Scientific and Standardization Committee of the International Society on Thrombosis and Haemostasis posted, on the ISTH Website 29 Nov., 2000, that the most widely used measure of hemophilia A is established by determining the circulating concentrations of plasma FVIII procoagulant levels, with persons with <1% (<0.01 IU/ml) factor VIII defined as severe; 1-5% (0.01-0.05 IU/ml) as moderately severe; and >5-40% (0.05-<0.40 IU/ml) as mild, where normal is 1 IU/ml of factor VIIIC (100%). The therapeutic levels can be established for new compositions, including those CFXTEN and pharmaceutical compositions comprising CFXTEN of the disclosure, using standard methods. The methods for establishing the therapeutic levels and dosing schedules for a given composition are known to those of skill in the art (see, e.g., Goodman & Gilman's The Pharmacological Basis of Therapeutics, 11^{th} Edition, McGraw-Hill (2005)). For example, by using dose-escalation studies in subjects with the target disease or disorder to determine efficacy or a desirable pharmacologic effect, appearance of adverse events, and determination of circulating blood levels, the therapeutic blood levels for a given subject or population of subjects can be determined for a given drug or biologic. The dose escalation studies would evaluate the activity of a CFXTEN through studies in a subject or group of hemophilia A subjects. The studies would monitor blood levels of procoagulant, as well as physiological or clinical parameters as known in the art or as described herein for one or more parameters associated with the factor VIII-related disease or disorder, or clinical parameters associated with a beneficial outcome, together with observations and/or measured parameters to determine the no effect dose, adverse events, minimum effective dose and the like, together with measurement of pharmacokinetic parameters that establish the determined or derived circulating blood levels. The results can then be correlated with the dose administered and the blood concentrations of the therapeutic that are coincident with the foregoing determined parameters or effect levels. By these methods, a range of doses and blood concentrations can be correlated to the minimum effective dose as well as the maximum dose and blood concentration at which a desired effect occurs and the period for which it can be maintained, thereby establishing the therapeutic blood levels and dosing schedule for the composition. Thus, by the foregoing methods, a Cₘᵢₙ blood level is established, below which the CFXTEN fusion protein would not have the desired pharmacologic effect and a Cₘₐₓ blood level, above which side effects such as thrombosis may occur (Brobrow, R S, JABFP (2005) 18(2):147-149), establishing the therapeutic window for the composition.

[0439] One of skill in the art can, by the means disclosed herein or by other methods known in the art, confirm that the administered CFXTEN remains at therapeutic blood levels to maintain hemostasis for the desired interval or requires adjustment in dose or length or sequence of XTEN. Further, the determination of the appropriate dose and dose frequency to keep the CFXTEN within the therapeutic window establishes the therapeutically effective dose regimen; the schedule for administration of multiple consecutive doses using a therapeutically effective dose of the fusion protein to a subject in need thereof resulting in consecutive Cₘₐₓ peaks and/or Cₘᵢₙ troughs that remain above therapeutically-effective concentrations and result in an improvement in at least one measured parameter relevant for the target disease, disorder or condition. In one embodiment, the CFXTEN or a pharmaceutical compositions comprising CFXTEN administered at an appropriate dose to a subject results in blood concentrations of the CFXTEN fusion protein that remains above the minimum effective concentration to maintain hemostasis for a period at least about two-fold longer compared to the corresponding FVIII not linked to XTEN and administered at a comparable dose; alternatively at least about three-fold longer; alternatively at least about four-fold longer; alternatively at least about five-fold longer; alternatively at least about six-fold longer; alternatively at least about seven-fold longer; alternatively at least about eight-fold longer; alternatively at least about nine-fold longer, alternatively at least about ten-fold longer, or at least about twenty-fold longer or greater compared to the corresponding FVIII not linked to XTEN and administered at a comparable dose. As used herein, an “appropriate dose” means a dose of a drug or biologic that, when administered to a subject, would result in a desirable therapeutic or pharmacologic effect and/or a blood concentration within the therapeutic window.

[0440] In one embodiment, the CFXTEN or a pharmaceutical compositions comprising CFXTEN administered at a therapeutically effective dose regimen results in a gain in time of at least about three-fold longer; alternatively at least about four-fold longer; alternatively at least about five-fold longer; alternatively at least about six-fold longer; alternatively at least about seven-fold longer; alternatively at least about eight-fold longer; alternatively at least about nine-fold longer or at least about ten-fold longer between at least two consecutive Cₘₐₓ peaks and/or Cₘᵢₙ troughs for blood levels of the fusion protein compared to the corresponding biologically active protein of the fusion protein not linked to the XTEN and administered at a comparable dose regimen to a subject. In another embodiment, the CFXTEN administered at a therapeutically effective dose regimen results in a comparable improvement in one, or two, or three or more measured parameters using less frequent dosing or a lower total dosage in IUs of the fusion protein of the pharmaceutical composition compared to the corresponding biologically active protein component(s) not linked to the XTEN and administered to a subject using a therapeutically effective dose regimen for the FVIII. The measured parameters include any of the clinical, biochemical, or physiological parameters disclosed herein, or others known in the art for assessing subjects with factor VIII-related disorders.

[0441] (b) Pharmacology and Pharmaceutical Properties of CFXTEN

[0442] The present invention provides CFXTEN compositions comprising FVIII covalently linked to XTEN that have enhanced pharmaceutical and pharmacology properties compared to FVIII not linked to XTEN, as well as methods to enhance the therapeutic and/or procoagulant effect of the FVIII components of the compositions. In addition, the invention provides CFXTEN compositions with enhanced properties compared to those art-known fusion proteins of factor VIII containing albumin, immunoglobulin polypeptide partners, polypeptides of shorter length and/or polypeptide partners with repetitive sequences. In addition, CFXTEN fusion proteins provide significant advantages over chemical conjugates, such as pegylated constructs of FVIII, notably the fact that recombinant CFXTEN fusion proteins can be made in host cell expression systems, which can reduce time and cost at both the research and development and manufacturing stages of a product, as well as result in a more homogeneous, defined product with less toxicity from both the product and metabolites of the CFXTEN compared to pegylated conjugates.

[0443] As therapeutic agents, the CFXTEN possesses a number of advantages over therapeutics not comprising XTEN, including one or more of the following non-limiting properties: increased solubility, increased thermal stability, reduced immunogenicity, increased apparent molecular weight, reduced renal clearance, reduced proteolysis, reduced metabolism, enhanced therapeutic efficiency, less frequent dosage regimen with increased time between doses capable of maintaining hemostasis in a subject with hemophilia A, the ability to administer the CFXTEN composition subcutaneously or intramuscularly, a “tailored” rate of absorption when administered subcutaneously or intramuscularly, enhanced lyophilization stability, enhanced serum/plasma stability, increased terminal half-life, increased solubility in blood stream, decreased binding by neutralizing antibodies, decreased active clearance, tailored substrate binding affinity, stability to degradation, stability to freeze-thaw, stability to proteases, stability to ubiquitination, ease of administration, compatibility with other pharmaceutical excipients or carriers, persistence in the subject, increased stability in storage (e.g., increased shelf-life), and the like. The net effect of the enhanced properties is that the use of a CFXTEN composition can result in an overall enhanced therapeutic effect compared to a FVIII not linked to XTEN, result in economic benefits associated with less frequent dosing, and/or result in improved patient compliance when administered to a subject with a factor VIII-related disease, disorder or condition.

[0444] In one embodiment, XTEN as a fusion partner increases the solubility of the FVIII payload. Accordingly, where enhancement of the pharmaceutical or physicochemical properties of the FVIII is desirable, such as the degree of aqueous solubility or stability, the length and/or the motif family composition of the XTEN sequences incorporated into the fusion protein may each be selected to confer a different degree of solubility and/or stability on the respective fusion proteins such that the overall pharmaceutical properties of the CFXTEN composition are enhanced. The CFXTEN fusion proteins can be constructed and assayed, using methods described herein, to confirm the physicochemical properties and the choice of the XTEN length sequence or location adjusted, as needed, to result in the desired properties. In one embodiment, the CFXTEN has an aqueous solubility that is at least about 25% greater compared to a FVIII not linked to the XTEN, or at least about 30%, or at least about 40%, or at least about 50%, or at least about 75%, or at least about 100%, or at least about 200%, or at least about 300%, or at least about 400%, or at least about 500%, or at least about 1000% greater than the corresponding FVIII not linked to XTEN.

[0445] The invention provides methods to produce and recover expressed CFXTEN from a host cell with enhanced solubility and ease of recovery compared to FVIII not linked to XTEN. In one embodiment, the method includes the steps of transforming a eukaryotic host cell with a polynucleotide encoding a CFXTEN with one or more XTEN components of cumulative sequence length greater than about 100, or greater than about 200, or greater than about 400, or greater than about 600, or greater than about 800, or greater than about 1000, or greater than about 2000, or greater than about 3000 amino acid residues, expressing the CFXTEN fusion protein in the host cell under suitable culture and induction conditions, and recovering the expressed fusion protein in soluble form. In one embodiment, the one or more XTEN of the CFXTEN fusion proteins each have at least about 80% sequence identity, or about 90%, or about 91%, or about 92%, or about 93%, or about 94%, or about 95%, or about 96%, or about 97%, or about 98%, or about 99%, to about 100% sequence identity compared to one or more XTEN selected from any one of Tables 4, and 9-13, or fragments thereof, and the FVIII have at least about 80% sequence identity, or about 90%, or about 91%, or about 92%, or about 93%, or about 94%, or about 95%, or about 96%, or about 97%, or about 98%, or about 99%, or 100% sequence identity compared to a FVIII selected from Table 1, and the CFXTEN components are in an N- to C-terminus configuration selected from any one of the configuration embodiments disclosed herein.

### VI). Uses of the CFXTEN Compositions

[0446] In another aspect, the invention provides a method for achieving a beneficial effect in bleeding disorders and/or in a factor VIII-related disease, disorder or condition mediated by FVIII. As used herein, “factor VIII-related diseases, disorders or conditions” is intended to include, but is not limited to factor VIII deficiencies, bleeding disorders related to factor VIII deficiency, hemophilia A, and bleeding from trauma or surgery or vascular injury that can be ameliorated or corrected by administration of FVIII to a subject. The present invention provides methods for treating a subject, such as a human, with a factor VIII-related disease, disorder or condition in order to achieve a beneficial effect, addressing disadvantages and/or limitations of other methods of treatment using factor VIII preparations that have a relatively short terminal half-life, require repeated administrations, or have unfavorable pharmacoeconomics.

[0447] Hemostasis is regulated by multiple protein factors, and such proteins, as well as analogues thereof, have found utility in the treatment of factor VIII-related diseases, disorders and conditions. However, the use of commercially-available FVIII has met with less than optimal success in the management of subjects afflicted with such diseases, disorders and conditions. In particular, dose optimization and frequency of dosing is important for FVIII used in maintaining circulating FVIII concentrations above threshold levels needed for hemostasis, as well as the treatment or prevention of bleeding episodes in hemophilia A subjects. The fact that FVIII products have a short half-life necessitates frequent dosing in order to achieve clinical benefit, which results in difficulties in the management of such patients.

[0448] As established by the Subcommittee on Factor VIII and Factor IX of the Scientific and Standardization Committee of the International Society on Thrombosis and Haemostasis (posted on the ISTH Website 29 Nov., 2000), the most widely used measure of the severity of hemophilia A is established by determining the circulating concentrations of plasma FVIII procoagulant levels, with persons with <1% (<0.01 IU/ml) factor VIII defined as severe; 1-5% (0.01-0.05 IU/ml) as moderately severe; and >5-40% (0.05-<0.40 IU/ml) as mild, where normal is 1 IU/ml of factor VIIIC (100%).

[0449] In some embodiments, the invention provides methods of treatment comprising administering a therapeutically- or prophylactically-effective amount of a CFXTEN pharmaceutical composition to a subject suffering from or at risk of developing a factor VIII-related disease, disorder or condition, wherein the administration results in the improvement of one or more biochemical, physiological or clinical parameters associated with the disease, disorder or condition. In one embodiment of the foregoing method, the administered CFXTEN comprises a FVIII with at least about 80%, or at least about 90%, or at least about 95%, or at least about 97%, or at least about 99% sequence identity to a factor VIII of Table 1. In another embodiment of the foregoing method, the administered CFXTEN comprises a FVIII with at least about 80%, or at least about 90%, or at least about 95%, or at least about 97%, or at least about 99% sequence identity to a factor VIII of Table 1 or Table 31 and at least one XTEN sequence with at least about 80%, or at least about 90%, or at least about 95%, or at least about 97%, or at least about 99% sequence identity to an XTEN of Table 4. In another embodiment of the foregoing method, the administered CFXTEN has a sequence with at least about 80%, or at least about 90%, or at least about 95%, or at least about 97%, or at least about 99% sequence identity to a sequence of Table 14, Table 28, Table 29, or Table 30.

[0450] The invention provides methods of treatment comprising administering a therapeutically-effective amount of an CFXTEN composition to a subject suffering from hemophilia A wherein the administration results in the improvement of one or more biochemical, physiological or clinical parameters associated with the FVIII disease, disorder or condition for a period at least two-fold longer, or at least four-fold longer, or at least five-fold longer, or at least six-fold longer compared to a FVIII not linked to XTEN and administered at a comparable dose. In one embodiment of the method of treatment, a CFXTEN composition or a pharmaceutical compositions comprising CFXTEN is administered to a subject suffering from hemophilia A in an amount sufficient to increase the circulating FVIII procoagulant concentration to greater than 0.01 IU/ml (1% of normal), or greater than 0.01-0.05 IU/ml (1%-5% of normal), or greater than >0.05-<0.40 IU/ml (>5%-<40% of normal). In the foregoing embodiment, the specified concentration is maintained for at least about 12 h, or at least about 24 h, or at least about 48 h, or at least about 72 h, or at least about 96 h, or at least about 120 h, or at least about 144 h, or at least about 168 h, or greater. In another embodiment of the method of treatment, a CFXTEN fusion protein or a pharmaceutical compositions comprising CFXTEN is administered to a subject with anti-FVIII antibodies in an amount sufficient to increase the active, circulating FVIII procoagulant concentration to greater than 0.01 IU/ml (0.01-0.05 IU/ml (1% of normal), or greater than 0.01-0.05 IU/ml (1%-5% of normal), or greater than >0.05-<0.40 IU/ml (>5%-<40% of normal). In the foregoing embodiment, the specified concentration is maintained for at least about 12 h, or at least about 24 h, or at least about 48 h, or at least about 72 h, or at least about 96 h, or at least about 120 h, or at least about 144 h, or at least about 168 h, or greater. In another embodiment of the method of treatment, a therapeutically effective amount of a CFXTEN composition or a pharmaceutical compositions comprising CFXTEN is administered to a subject suffering from a bleeding episode, wherein the administration results in the resolution of the bleeding for a duration at least two-fold, or at least three-fold, or at least four-fold longer compared to a FVIII not linked to XTEN and administered to a subject at a comparable dose. In another embodiment, the administration of a therapeutically effective amount of a CFXTEN composition or a pharmaceutical compositions comprising CFXTEN to a subject in need thereof results in a greater reduction in a one-stage clotting assay time of at least about 5%, or about 10%, or about 20%, or about 30%, or about 40%, or about 50%, or about 60%, or about 70%, or more in the subject at 2-7 days after the administration compared to the assay time in a subject after administration of a comparable amount of the corresponding FVIII not linked to XTEN. In another embodiment, the administration of a therapeutically effective amount of a CFXTEN or a pharmaceutical compositions comprising CFXTEN to a subject in need thereof results in a reduction in the activated partial prothrombin time of at least about 5%, or about 10%, or about 20%, or about 30%, or about 40%, or about 50%, or about 60%, or about 70%, or more in the subject 2-7 days after administration compared to the activated partial prothrombin time in a subject after administration of a comparable amount of the corresponding FVIII not linked to XTEN. In another embodiment, the administration of a CFXTEN or a pharmaceutical compositions comprising CFXTEN to a subject in need thereof using a therapeutically effective amount results in maintenance of activated partial prothrombin times within 30% of normal in the subject for a period of time that is at least two-fold, or at least about three-fold, or at least about four-fold longer compared to that of a FVIII not linked to XTEN and administered to a subject using a comparable dose.

[0451] In some embodiments of the method of treatment, (i) a smaller IU amount of about two-fold less, or about three-fold less, or about four-fold less, or about five-fold less, or about six-fold less, or about eight-fold less, or about 10-fold less of the CFXTEN fusion protein or a pharmaceutical compositions comprising CFXTEN is administered to a subject in need thereof in comparison to the corresponding coagulation factor not linked to the XTEN under an otherwise same dose regimen, and the fusion protein achieves a comparable area under the curve (based on IU/ml) and/or a comparable therapeutic effect as the corresponding FVIII not linked to the XTEN; (ii) the CFXTEN fusion protein is administered less frequently (e.g., every three days, about every seven days, about every 10 days, about every 14 days, about every 21 days, or about monthly) in comparison to the corresponding FVIII not linked to the XTEN under an otherwise same dose amount, and the fusion protein achieves a comparable area under the curve and/or a comparable therapeutic effect as the corresponding coagulation factor not linked to the XTEN; or (iii) an accumulative smaller IU amount of at least about 20%, or about 30%, or about 40%, or about 50%, or about 60%, or about 70%, or about 80%, or about 90% less of the fusion protein is administered in comparison to the corresponding FVIII not linked to the XTEN under an otherwise same dose regimen and the CFXTEN fusion protein achieves a comparable area under the curve and/or a comparable therapeutic effect as the corresponding FVIII not linked to the XTEN. The accumulative smaller IU amount is measured for a period of at least about one week, or about 14 days, or about 21 days, or about one month. In the foregoing embodiments of the method of treatment, the therapeutic effect can be determined by any of the measured parameters described herein, including but not limited to blood concentrations of FVIII, results of an activated partial prothrombin (aPTT) assay, results of a one-stage or two-stage clotting assays, delayed onset of a bleeding episode, results of a chromogenic FVIII assay, or other assays known in the art for assessing coagulopathies of FVIII.

[0452] The invention further contemplates that the CFXTEN used in accordance with the methods provided herein can be administered in conjunction with other treatment methods and compositions (e.g., other coagulation proteins) useful for treating factor VIII-related diseases, disorders, and conditions, or conditions for which coagulation factor is adjunctive therapy; e.g., bleeding episodes due to injury or surgery.

[0453] In another aspect, the invention provides a method of preparing a medicament for treatment of a factor VIII-related disease, disorder or condition, comprising combining a factor VIII sequence selected from Table 1 or Table 31 with one or more XTEN to result in a CFXTEN fusion protein, wherein the CFXTEN retains at least a portion of the activity of the native FVIII, and further combining the CFXTEN with at least one pharmaceutically acceptable carrier, resulting in a CFXTEN pharmaceutical composition. In one embodiment of the method, the factor VIII has a sequence with at least about 80%, or at least about 90%, or at least about 95%, or at least about 97%, or at least about 99% sequence identity compared to a sequence selected from Table 1 or Table 31 and the one or more XTEN has a sequence with at least about 80%, or at least about 90%, or at least about 95%, or at least about 97%, or at least about 99% sequence identity compared to a sequence selected from any one of Tables 3, 4, and 9-13, or a fragment thereof. In another embodiment of the method, the CFXTEN has a sequence with at least about 80%, or at least about 90%, or at least about 95%, or at least about 97%, or at least about 99% sequence identity compared to a sequence selected from any one of Tables 14 and 28-30.

[0454] In another aspect, the invention provides a method of designing the CFXTEN compositions to achieve desired pharmacokinetic, pharmacologic or pharmaceutical properties. In general, the steps in the design and production of the fusion proteins and the inventive compositions, as illustrated in FIGS. 11-13, include: (1) the selection of a FVIII (e.g., native proteins, sequences of Table 1, analogs or derivatives with activity) to treat the particular disease, disorder or condition; (2) selecting the XTEN that will confer the desired PK and physicochemical characteristics on the resulting CFXTEN (e.g., the administration of the CFXTEN composition to a subject results in the fusion protein being maintained within the therapeutic window for a greater period compared to FVIII not linked to XTEN); (3) establishing a desired N- to C-terminus configuration of the CFXTEN to achieve the desired efficacy or PK parameters; (4) establishing the design of the expression vector encoding the configured CFXTEN; (5) transforming a suitable host with the expression vector; and (6) expression and recovery of the resultant fusion protein. For those CFXTEN for which an increase in half-life (greater than 24 h) or an increased period of time spent above the minimum effective concentration is desired, the XTEN chosen for incorporation generally has at least about 288, or about 432, or about 576, or about 864, or about 875, or about 912, or about 923 amino acid residues where a single XTEN is to be incorporated into the CFXTEN. In another embodiment, the CFXTEN comprises a first XTEN of the foregoing lengths, and at least a second XTEN of about 36, or about 72, or about 144, or about 288, or about 576, or about 864, or about 875, or about 912, or about 923, or about 1000 or more amino acid residues. The location of the XTEN within the fusion protein can include one, two, three, four, five or more locations selected from Table 5, Table 25, or FIG. 7.

[0455] In other embodiments, where an increase in a pharmaceutical property (e.g., solubility) is desired, a CFXTEN is designed to include multiple XTEN of shorter lengths. In one embodiment of the foregoing, the CFXTEN comprises a FVIII linked to multiple XTEN having at least about 24, or about 36, or about 48, or about 60, or about 72, or about 84, or about 96 amino acid residues inserted at sites selected from Table 5, Table 25, or FIG. 7, in which the solubility of the fusion protein under physiologic conditions is at least three-fold greater than the corresponding FVIII not linked to XTEN, or alternatively, at least four-fold, or five-fold, or six-fold, or seven-fold, or eight-fold, or nine-fold, or at least 10-fold, or at least 20-fold, or at least 30-fold, or at least 50-fold, or at least 60-fold or greater than FVIII not linked to XTEN. In one embodiment of the foregoing, the CF is a FVIII with at least about 80%, or about 90%, or about 95% identity to a sequence from Table 1 or Table 31 and the XTEN is a sequence with at least about 80%, or about 90%, or about 95% sequence identity compared to a sequence from any one of Tables 3, 4, and 9-13.

[0456] In another aspect, the invention provides methods of making CFXTEN compositions to improve ease of manufacture, result in increased stability, increased water solubility, and/or ease of formulation, as compared to the native FVIII. In one embodiment, the invention includes a method of increasing the water solubility of a FVIII comprising the step of linking the FVIII to one or more XTEN such that a higher concentration in soluble form of the resulting CFXTEN can be achieved, under physiologic conditions, compared to the FVIII in an un-fused state. Factors that contribute to the property of XTEN to confer increased water solubility of CFs when incorporated into a fusion protein include the high solubility of the XTEN fusion partner and the low degree of self-aggregation between molecules of XTEN in solution. In some embodiments, the method results in a CFXTEN fusion protein wherein the water solubility is at least about 20%, or at least about 30% greater, or at least about 50% greater, or at least about 75% greater, or at least about 90% greater, or at least about 100% greater, or at least about 150% greater, or at least about 200% greater, or at least about 400% greater, or at least about 600% greater, or at least about 800% greater, or at least about 1000% greater, or at least about 2000% greater under physiologic conditions, compared to the un-fused FVIII. In one embodiment, the XTEN of the CFXTEN fusion protein is a sequence with at least about 80%, or about 90%, or about 95% sequence identity compared to a sequence from any one of Tables 3, 4, and 9-13.

[0457] In another embodiment, the invention includes a method of increasing the shelf-life of a FVIII comprising the step of linking the FVIII with one or more XTEN selected such that the shelf-life of the resulting CFXTEN is extended compared to the FVIII in an un-fused state. As used herein, shelf-life refers to the period of time over which the functional activity of a FVIII or CFXTEN that is in solution or in some other storage formulation remains stable without undue loss of activity. As used herein, “functional activity” refers to a pharmacologic effect or biological activity, such as the ability to bind a receptor or ligand, or substrate, or to display procoagulant activity associated with FVIII, as known in the art. A FVIII that degrades or aggregates generally has reduced functional activity or reduced bioavailability compared to one that remains in solution. Factors that contribute to the ability of the method to extend the shelf life of CFs when incorporated into a fusion protein include increased water solubility, reduced self-aggregation in solution, and increased heat stability of the XTEN fusion partner. In particular, the low tendency of XTEN to aggregate facilitates methods of formulating pharmaceutical preparations containing higher drug concentrations of CFs, and the heat-stability of XTEN contributes to the property of CFXTEN fusion proteins to remain soluble and functionally active for extended periods. In one embodiment, the method results in CFXTEN fusion proteins with “prolonged” or “extended” shelf-life that exhibit greater activity relative to a standard that has been subjected to the same storage and handling conditions. The standard may be the un-fused full-length FVIII. In one embodiment, the method includes the step of formulating the isolated CFXTEN with one or more pharmaceutically acceptable excipients that enhance the ability of the XTEN to retain its unstructured conformation and for the CFXTEN to remain soluble in the formulation for a time that is greater than that of the corresponding un-fused FVIII. In one embodiment, the method comprises linking a FVIII to one or more XTEN selected from any one of Tables 3, 4, and 9-13 to create a CFXTEN fusion protein results in a solution that retains greater than about 100% of the functional activity, or greater than about 105%, 110%, 120%, 130%, 150% or 200% of the functional activity of a standard when compared at a given time point and when subjected to the same storage and handling conditions as the standard, thereby increasing its shelf-life.

[0458] Shelf-life may also be assessed in terms of functional activity remaining after storage, normalized to functional activity when storage began. CFXTEN fusion proteins of the invention with prolonged or extended shelf-life as exhibited by prolonged or extended functional activity retain about 50% more functional activity, or about 60%, 70%, 80%, or 90% more of the functional activity of the equivalent FVIII not linked to XTEN when subjected to the same conditions for the same period of time. For example, a CFXTEN fusion protein of the invention comprising coagulation factor fused to one or more XTEN sequences selected from any one of Tables 3, 4, and 9-13 retains about 80% or more of its original activity in solution for periods of up to 2 weeks, or 4 weeks, or 6 weeks or longer under various temperature conditions. In some embodiments, the CFXTEN retains at least about 50%, or about 60%, or at least about 70%, or at least about 80%, and most preferably at least about 90% or more of its original activity in solution when heated at 80° C. for 10 min. In other embodiments, the CFXTEN retains at least about 50%, preferably at least about 60%, or at least about 70%, or at least about 80%, or alternatively at least about 90% or more of its original activity in solution when heated or maintained at 37° C. for about 7 days. In another embodiment, CFXTEN fusion protein retains at least about 80% or more of its functional activity after exposure to a temperature of about 30° C. to about 70° C. over a period of time of about one hour to about 18 hours. In the foregoing embodiments hereinabove described in this paragraph, the retained activity of the CFXTEN is at least about two-fold, or at least about three-fold, or at least about four-fold, or at least about five-fold, or at least about six-fold greater at a given time point than that of the corresponding FVIII not linked to the XTEN.

### VII). The Nucleic Acids Sequences of the Invention

[0459] The present invention provides isolated polynucleic acids encoding CFXTEN chimeric fusion proteins and sequences complementary to polynucleic acid molecules encoding CFXTEN chimeric fusion proteins, including homologous variants thereof. In another aspect, the invention encompasses methods to produce polynucleic acids encoding CFXTEN chimeric fusion proteins and sequences complementary to polynucleic acid molecules encoding CFXTEN chimeric fusion protein, including homologous variants thereof. In general, and as illustrated in FIGS. 11-13, the methods of producing a polynucleotide sequence coding for a CFXTEN fusion protein and expressing the resulting gene product include assembling nucleotides encoding FVIII and XTEN, ligating the components in frame, incorporating the encoding gene into an expression vector appropriate for a host cell, transforming the appropriate host cell with the expression vector, and culturing the host cell under conditions causing or permitting the fusion protein to be expressed in the transformed host cell, thereby producing the biologically-active CFXTEN polypeptide, which is recovered as an isolated fusion protein by standard protein purification methods known in the art. Standard recombinant techniques in molecular biology is used to make the polynucleotides and expression vectors of the present invention.

[0460] In accordance with the invention, nucleic acid sequences that encode CFXTEN (or its complement) is used to generate recombinant DNA molecules that direct the expression of CFXTEN fusion proteins in appropriate host cells. Several cloning strategies are suitable for performing the present invention, many of which is used to generate a construct that comprises a gene coding for a fusion protein of the CFXTEN composition of the present invention, or its complement. In some embodiments, the cloning strategy is used to create a gene that encodes a monomeric CFXTEN that comprises at least a first FVIII and at least a first XTEN polypeptide, or their complement. In one embodiment of the foregoing, the gene comprises a sequence encoding a FVIII or sequence variant. In other embodiments, the cloning strategy is used to create a gene that encodes a monomeric CFXTEN that comprises nucleotides encoding at least a first molecule of FVIII or its complement and a first and at least a second XTEN or their complement that is used to transform a host cell for expression of the fusion protein of the CFXTEN composition. In the foregoing embodiments hereinabove described in this paragraph, the genes can further comprise nucleotides encoding spacer sequences that also encode cleavage sequence(s).

[0461] In designing a desired XTEN sequences, it was discovered that the non-repetitive nature of the XTEN of the inventive compositions is achieved despite use of a “building block” molecular approach in the creation of the XTEN-encoding sequences. This was achieved by the use of a library of polynucleotides encoding peptide sequence motifs, described above, that are then ligated and/or multimerized to create the genes encoding the XTEN sequences (see FIGS. 11 and 12 and Examples). Thus, while the XTEN(s) of the expressed fusion protein may consist of multiple units of as few as four different sequence motifs, because the motifs themselves consist of non-repetitive amino acid sequences, the overall XTEN sequence is rendered non-repetitive. Accordingly, in one embodiment, the XTEN-encoding polynucleotides comprise multiple polynucleotides that encode non-repetitive sequences, or motifs, operably linked in frame and in which the resulting expressed XTEN amino acid sequences are non-repetitive.

[0462] In one approach, a construct is first prepared containing the DNA sequence corresponding to CFXTEN fusion protein. DNA encoding the FVIII of the compositions is obtained from a cDNA library prepared using standard methods from tissue or isolated cells believed to possess FVIII mRNA and to express it at a detectable level. Libraries are screened with probes containing, for example, about 20 to 100 bases designed to identify the FVIII gene of interest by hybridization using conventional molecular biology techniques. The best candidates for probes are those that represent sequences that are highly homologous for coagulation factor, and should be of sufficient length and sufficiently unambiguous that false positives are minimized, but may be degenerate at one or more positions. If necessary, the coding sequence can be obtained using conventional primer extension procedures as described in Sambrook, et al., supra, to detect precursors and processing intermediates of mRNA that may not have been reverse-transcribed into cDNA. One can then use polymerase chain reaction (PCR) methodology to amplify the target DNA or RNA coding sequence to obtain sufficient material for the preparation of the CFXTEN constructs containing the FVIII gene. Assays can then be conducted to confirm that the hybridizing full-length genes are the desired FVIII gene(s). By these conventional methods, DNA can be conveniently obtained from a cDNA library prepared from such sources. The FVIII encoding gene(s) is also be obtained from a genomic library or created by standard synthetic procedures known in the art (e.g., automated nucleic acid synthesis using, for example one of the methods described in Engels et al. (Agnew. Chem. Int. Ed. Engl., 28:716-734 1989)), using DNA sequences obtained from publicly available databases, patents, or literature references. Such procedures are well known in the art and well described in the scientific and patent literature. For example, sequences can be obtained from Chemical Abstracts Services (CAS) Registry Numbers (published by the American Chemical Society) and/or GenBank Accession Numbers (e.g., Locus ID, NP_XXXXX, and XP_XXXXX) Model Protein identifiers available through the National Center for Biotechnology Information (NCBI) webpage, available on the world wide web at ncbi.nlm.nih.gov that correspond to entries in the CAS Registry or GenBank database that contain an amino acid sequence of the protein of interest or of a fragment or variant of the protein. For such sequence identifiers provided herein, the summary pages associated with each of these CAS and GenBank and GenSeq Accession Numbers as well as the cited journal publications (e.g., PubMed ID number (PMID)) are each incorporated by reference in their entireties, particularly with respect to the amino acid sequences described therein. In one embodiment, the FVIII encoding gene encodes a protein from any one of Table 1, or a fragment or variant thereof.

[0463] A gene or polynucleotide encoding the FVIII portion of the subject CFXTEN protein, in the case of an expressed fusion protein that comprises a single FVIII is then be cloned into a construct, which is a plasmid or other vector under control of appropriate transcription and translation sequences for high level protein expression in a biological system. In a later step, a second gene or polynucleotide coding for the XTEN is genetically fused to the nucleotides encoding the N- and/or C-terminus of the FVIII gene by cloning it into the construct adjacent and in frame with the gene(s) coding for the FVIII. This second step occurs through a ligation or multimerization step. In the foregoing embodiments hereinabove described in this paragraph, it is to be understood that the gene constructs that are created can alternatively be the complement of the respective genes that encode the respective fusion proteins.

[0464] The gene encoding for the XTEN can be made in one or more steps, either fully synthetically or by synthesis combined with enzymatic processes, such as restriction enzyme-mediated cloning, PCR and overlap extension, including methods more fully described in the Examples. The methods disclosed herein can be used, for example, to ligate short sequences of polynucleotides encoding XTEN into longer XTEN genes of a desired length and sequence. In one embodiment, the method ligates two or more codon-optimized oligonucleotides encoding XTEN motif or segment sequences of about 9 to 14 amino acids, or about 12 to 20 amino acids, or about 18 to 36 amino acids, or about 48 to about 144 amino acids, or about 144 to about 288 or longer, or any combination of the foregoing ranges of motif or segment lengths.

[0465] Alternatively, the disclosed method is used to multimerize XTEN-encoding sequences into longer sequences of a desired length; e.g., a gene encoding 36 amino acids of XTEN can be dimerized into a gene encoding 72 amino acids, then 144, then 288, etc. Even with multimerization, XTEN polypeptides can be constructed such that the XTEN-encoding gene has low or virtually no repetitiveness through design of the codons selected for the motifs of the shortest unit being used, which can reduce recombination and increase stability of the encoding gene in the transformed host.

[0466] Genes encoding XTEN with non-repetitive sequences are assembled from oligonucleotides using standard techniques of gene synthesis. The gene design can be performed using algorithms that optimize codon usage and amino acid composition. In one method of the invention, a library of relatively short XTEN-encoding polynucleotide constructs is created and then assembled, as described above. The resulting genes are then assembled with genes encoding FVIII or regions of FVIII, as illustrated in FIGS. 11 and 12, and the resulting genes used to transform a host cell and produce and recover the CFXTEN for evaluation of its properties, as described herein.

[0467] In some embodiments, the CFXTEN sequence is designed for optimized expression by inclusion of an N-terminal sequence (NTS) XTEN, rather than using a leader sequence known in the art. In one embodiment, the NTS is created by inclusion of encoding nucleotides in the XTEN gene determined to result in optimized expression when joined to the gene encoding the fusion protein. In one embodiment, the N-terminal XTEN sequence of the expressed CFXTEN is optimized for expression in a eukaryotic cell, such as but not limited to CHO, HEK, COS, yeast, and other cell types know in the art.

### Polynucleotide Libraries

[0468] In another aspect, the invention provides libraries of polynucleotides that encode XTEN sequences that are used to assemble genes that encode XTEN of a desired length and sequence.

[0469] In certain embodiments, the XTEN-encoding library constructs comprise polynucleotides that encode polypeptide segments of a fixed length. As an initial step, a library of oligonucleotides that encode motifs of 9-14 amino acid residues can be assembled. In a preferred embodiment, libraries of oligonucleotides that encode motifs of 12 amino acids are assembled.

[0470] The XTEN-encoding sequence segments can be dimerized or multimerized into longer encoding sequences. Dimerization or multimerization can be performed by ligation, overlap extension, PCR assembly or similar cloning techniques known in the art. This process of can be repeated multiple times until the resulting XTEN-encoding sequences have reached the organization of sequence and desired length, providing the XTEN-encoding genes. As will be appreciated, a library of polynucleotides that encodes, e.g., 12 amino acid motifs can be dimerized and/or ligated into a library of polynucleotides that encode 36 amino acids. Libraries encoding motifs of different lengths; e.g., 9-14 amino acid motifs leading to libraries encoding 27 to 42 amino acids are contemplated by the invention. In turn, the library of polynucleotides that encode 27 to 42 amino acids, and preferably 36 amino acids (as described in the Examples) can be serially dimerized into a library containing successively longer lengths of polynucleotides that encode XTEN sequences of a desired length for incorporation into the gene encoding the CFXTEN fusion protein, as disclosed herein.

[0471] A more efficient way to optimize the DNA sequence encoding XTEN is based on combinatorial libraries. The gene encoding XTEN can be designed and synthesized in segment such that multiple codon versions are obtained for each segment. These segments can be randomly assembled into a library of genes such that each library member encodes the same amino acid sequences but library members comprise a large number of codon versions. Such libraries can be screened for genes that result in high-level expression and/or a low abundance of truncation products. The process of combinatorial gene assembly is illustrated in FIG. 16. The genes in FIG. 16 are assembled from 6 base fragments and each fragment is available in 4 different codon versions. This allows for a theoretical diversity of 4096.

[0472] In some embodiments, libraries are assembled of polynucleotides that encode amino acids that are limited to specific sequence XTEN families; e.g., AD, AE, AF, AG, AM, or AQ sequences of Table 3. In other embodiments, libraries comprise sequences that encode two or more of the motif family sequences from Table 3. The names and sequences of representative, non-limiting polynucleotide sequences of libraries that encode 36 mers are presented in Tables 9-12, and the methods used to create them are described more fully in the respective Examples. In other embodiments, libraries that encode XTEN are constructed from segments of polynucleotide codons linked in a randomized sequence that encode amino acids wherein at least about 80%, or at least about 90%, or at least about 91%, or at least about 92%, or at least about 93%, or at least about 94%, or at least about 95%, or at least about 97%, or at least about 98%, or at least about 99% of the codons are selected from the group consisting of condons for glycine (G), alanine (A), serine (S), threonine (T), glutamate (E) and proline (P) amino acids. The libraries can be used, in turn, for serial dimerization or ligation to achieve polynucleotide sequence libraries that encode XTEN sequences, for example, of 48, 72, 144, 288, 576, 864, 875, 912, 923, 1318 amino acids, or up to a total length of about 3000 amino acids, as well as intermediate lengths, in which the encoded XTEN can have one or more of the properties disclosed herein, when expressed as a component of a CFXTEN fusion protein. In some cases, the polynucleotide library sequences may also include additional bases used as “sequencing islands,” described more fully below.

[0473] FIG. 12 is a schematic flowchart of representative, non-limiting steps in the assembly of a XTEN polynucleotide construct and a CFXTEN polynucleotide construct in the embodiments of the invention. Individual oligonucleotides 501 are annealed into sequence motifs 502 such as a 12 amino acid motif (“12-mer”), which is ligated to additional sequence motifs from a library to create a pool that encompasses the desired length of the XTEN 504, as well as ligated to a smaller concentration of an oligo containing BbsI, and KpnI restriction sites 503. The resulting pool of ligation products is gel-purified and the band with the desired length of XTEN is cut, resulting in an isolated XTEN gene with a stopper sequence 505. The XTEN gene is cloned into a stuffer vector. In this case, the vector encodes an optional CBD sequence 506 and a GFP gene 508. Digestion is than performed with BbsI/HindIII to remove 507 and 508 and place the stop codon. The resulting product is then cloned into a BsaI/HindIII digested vector containing a gene encoding the FVIII, resulting in the gene 500 encoding an FVIII-XTEN fusion protein. A non-exhaustive list of the polynucleotides encoding XTEN and precursor sequences is provided in Tables 8-13.

### Table 8: DNA Sequences of XTEN and Precursor Sequences

| XTEN | |
|---|---|
| Name | DNA Nucleotide Sequence |
| AE48 | ATGGCTGAACCTGCTGGCTCTCCAACCTCCACTGAGGAAGGTACCCCGGGTAGCGGTA |
| | CTGCTTCTTCCTCTCCAGGTAGCTCTACCCCTTCTGGTGCAACCGGCTCTCCAGGTGCT |
| | TCTCCGGGCACCAGCTCTACCGGTTCT |
| AM48 | ATGGCTGAACCTGCTGGCTCTCCAACCTCCACTGAGGAAGGTGCATCCCCGGGCACCA |
| | GCTCTACCGGTTCTCCAGGTAGCTCTACCCCGTCTGGTGCTACCGGCTCTCCAGGTAGC |
| | TCTACCCCGTCTGGTGCTACTGGCTCT |
| AE144 | GGTAGCGAACCGGCAACTTCCGGCTCTGAAACCCCAGGTACTTCTGAAAGCGCTACTC |
| | CTGAGTCTGGCCCAGGTAGCGAACCTGCTACCTCTGGCTCTGAAACCCCAGGTAGCCC |
| | GGCAGGCTCTCCGACTTCCACCGAGGAAGGTACCTCTACTGAACCTTCTGAGGGTAGC |
| | GCTCCAGGTAGCGAACCGGCAACCTCTGGCTCTGAAACCCCAGGTAGCGAACCTGCTA |
| | CCTCCGGCTCTGAAACTCCAGGTAGCGAACCGGCTACTTCCGGTTCTGAAACTCCAGG |
| | TACCTCTACCGAACCTTCCGAAGGCAGCGCACCAGGTACTTCTGAAAGCGCAACCCCT |
| | GAATCCGGTCCAGGTAGCGAACCGGCTACTTCTGGCTCTGAGACTCCAGGTACTTCTA |
| | CCGAACCGTCCGAAGGTAGCGCACCA |
| AF144 | GGTACTTCTACTCCGGAAAGCGGTTCCGCATCTCCAGGTACTTCTCCTAGCGGTGAATC |
| | TTCTACTGCTCCAGGTACCTCTCCTAGCGGCGAATCTTCTACTGCTCCAGGTTCTACCA |
| | GCTCTACCGCTGAATCTCCTGGCCCAGGTTCTACCAGCGAATCCCCGTCTGGCACCGC |
| | ACCAGGTTCTACTAGCTCTACCGCAGAATCTCCGGGTCCAGGTACTTCCCCTAGCGGT |
| | GAATCTTCTACTGCTCCAGGTACCTCTACTCCGGAAAGCGGCTCCGCATCTCCAGGTTC |
| | TACTAGCTCTACTGCTGAATCTCCTGGTCCAGGTACCTCCCCTAGCGGCGAATCTTCTA |
| | CTGCTCCAGGTACCTCTCCTAGCGGCGAATCTTCTACCGCTCCAGGTACCTCCCCTAGC |
| | GGTGAATCTTCTACCGCACCA |
| AE288 | GGTACCTCTGAAAGCGCAACTCCTGAGTCTGGCCCAGGTAGCGAACCTGCTACCTCCG |
| | GCTCTGAGACTCCAGGTACCTCTGAAAGCGCAACCCCGGAATCTGGTCCAGGTAGCGA |
| | ACCTGCAACCTCTGGCTCTGAAACCCCAGGTACCTCTGAAAGCGCTACTCCTGAATCT |
| | GGCCCAGGTACTTCTACTGAACCGTCCGAGGGCAGCGCACCAGGTAGCCCTGCTGGCT |
| | CTCCAACCTCCACCGAAGAAGGTACCTCTGAAAGCGCAACCCCTGAATCCGGCCCAGG |
| | TAGCGAACCGGCAACCTCCGGTTCTGAAACCCCAGGTACTTCTGAAAGCGCTACTCCT |
| | GAGTCCGGCCCAGGTAGCCCGGCTGGCTCTCCGACTTCCACCGAGGAAGGTAGCCCGG |
| | CTGGCTCTCCAACTTCTACTGAAGAAGGTACTTCTACCGAACCTTCCGAGGGCAGCGC |
| | ACCAGGTACTTCTGAAAGCGCTACCCCTGAGTCCGGCCCAGGTACTTCTGAAAGCGCT |
| | ACTCCTGAATCCGGTCCAGGTACTTCTGAAAGCGCTACCCCGGAATCTGGCCCAGGTA |
| | GCGAACCGGCTACTTCTGGTTCTGAAACCCCAGGTAGCGAACCGGCTACCTCCGGTTC |
| | TGAAACTCCAGGTAGCCCAGCAGGCTCTCCGACTTCCACTGAGGAAGGTACTTCTACT |
| | GAACCTTCCGAAGGCAGCGCACCAGGTACCTCTACTGAACCTTCTGAGGGCAGCGCTC |
| | CAGGTAGCGAACCTGCAACCTCTGGCTCTGAAACCCCAGGTACCTCTGAAAGCGCTAC |
| | TCCTGAATCTGGCCCAGGTACTTCTACTGAACCGTCCGAGGGCAGCGCACCA |
| AE576 | GGTAGCCCGGCTGGCTCTCCTACCTCTACTGAGGAAGGTACTTCTGAAAGCGCTACTC |
| | CTGAGTCTGGTCCAGGTACCTCTACTGAACCGTCCGAAGGTAGCGCTCCAGGTAGCCC |
| | AGCAGGCTCTCCGACTTCCACTGAGGAAGGTACTTCTACTGAACCTTCCGAAGGCAGC |
| | GCACCAGGTACCTCTACTGAACCTTCTGAGGGCAGCGCTCCAGGTACTTCTGAAAGCG |
| | CTACCCCGGAATCTGGCCCAGGTAGCGAACCGGCTACTTCTGGTTCTGAAACCCCAGG |
| | TAGCGAACCGGCTACCTCCGGTTCTGAAACTCCAGGTAGCCCGGCAGGCTCTCCGACC |
| | TCTACTGAGGAAGGTACTTCTGAAAGCGCAACCCCGGAGTCCGGCCCAGGTACCTCTA |
| | CCGAACCGTCTGAGGGCAGCGCACCAGGTACTTCTACCGAACCGTCCGAGGGTAGCG |
| | CACCAGGTAGCCCAGCAGGTTCTCCTACCTCCACCGAGGAAGGTACTTCTACCGAACC |
| | GTCCGAGGGTAGCGCACCAGGTACCTCTACTGAACCTTCTGAGGGCAGCGCTCCAGGT |
| | ACTTCTGAAAGCGCTACCCCGGAGTCCGGTCCAGGTACTTCTACTGAACCGTCCGAAG |
| | GTAGCGCACCAGGTACTTCTGAAAGCGCAACCCCTGAATCCGGTCCAGGTAGCGAACC |
| | GGCTACTTCTGGCTCTGAGACTCCAGGTACTTCTACCGAACCGTCCGAAGGTAGCGCA |
| | CCAGGTACTTCTACTGAACCGTCTGAAGGTAGCGCACCAGGTACTTCTGAAAGCGCAA |
| | CCCCGGAATCCGGCCCAGGTACCTCTGAAAGCGCAACCCCGGAGTCCGGCCCAGGTA |
| | GCCCTGCTGGCTCTCCAACCTCCACCGAAGAAGGTACCTCTGAAAGCGCAACCCCTGA |
| | ATCCGGCCCAGGTAGCGAACCGGCAACCTCCGGTTCTGAAACCCCAGGTACCTCTGAA |
| | AGCGCTACTCCGGAGTCTGGCCCAGGTACCTCTACTGAACCGTCTGAGGGTAGCGCTC |
| | CAGGTACTTCTACTGAACCGTCCGAAGGTAGCGCACCAGGTACTTCTACCGAACCGTC |
| | CGAAGGCAGCGCTCCAGGTACCTCTACTGAACCTTCCGAGGGCAGCGCTCCAGGTACC |
| | TCTACCGAACCTTCTGAAGGTAGCGCACCAGGTACTTCTACCGAACCGTCCGAGGGTA |
| | GCGCACCAGGTAGCCCAGCAGGTTCTCCTACCTCCACCGAGGAAGGTACTTCTACCGA |
| | ACCGTCCGAGGGTAGCGCACCAGGTACCTCTGAAAGCGCAACTCCTGAGTCTGGCCCA |
| | GGTAGCGAACCTGCTACCTCCGGCTCTGAGACTCCAGGTACCTCTGAAAGCGCAACCC |
| | CGGAATCTGGTCCAGGTAGCGAACCTGCAACCTCTGGCTCTGAAACCCCAGGTACCTC |
| | TGAAAGCGCTACTCCTGAATCTGGCCCAGGTACTTCTACTGAACCGTCCGAGGGCAGC |
| | GCACCAGGTACTTCTGAAAGCGCTACTCCTGAGTCCGGCCCAGGTAGCCCGGCTGGCT |
| | CTCCGACTTCCACCGAGGAAGGTAGCCCGGCTGGCTCTCCAACTTCTACTGAAGAAGG |
| | TAGCCCGGCAGGCTCTCCGACCTCTACTGAGGAAGGTACTTCTGAAAGCGCAACCCCG |
| | GAGTCCGGCCCAGGTACCTCTACCGAACCGTCTGAGGGCAGCGCACCA |
| AF576 | GGTTCTACTAGCTCTACCGCTGAATCTCCTGGCCCAGGTTCCACTAGCTCTACCGCAGA |
| | ATCTCCGGGCCCAGGTTCTACTAGCGAATCCCCTTCTGGTACCGCTCCAGGTTCTACTA |
| | GCTCTACCGCTGAATCTCCGGGTCCAGGTTCTACCAGCTCTACTGCAGAATCTCCTGGC |
| | CCAGGTACTTCTACTCCGGAAAGCGGTTCCGCTTCTCCAGGTTCTACCAGCGAATCTCC |
| | TTCTGGCACCGCTCCAGGTACCTCTCCTAGCGGCGAATCTTCTACCGCTCCAGGTTCTA |
| | CTAGCGAATCTCCTTCTGGCACTGCACCAGGTTCTACCAGCGAATCTCCTTCTGGCACC |
| | GCTCCAGGTACCTCTCCTAGCGGCGAATCTTCTACCGCTCCAGGTTCTACTAGCGAATC |
| | TCCTTCTGGCACTGCACCAGGTTCTACCAGCGAATCTCCTTCTGGCACCGCTCCAGGTA |
| | CCTCTCCTAGCGGCGAATCTTCTACCGCTCCAGGTTCTACTAGCGAATCTCCTTCTGGC |
| | ACTGCACCAGGTTCTACTAGCGAATCTCCTTCTGGCACTGCACCAGGTTCTACCAGCG |
| | AATCTCCGTCTGGCACTGCACCAGGTACCTCTACCCCTGAAAGCGGTTCCGCTTCTCCA |
| | GGTTCTACTAGCGAATCTCCTTCTGGTACCGCTCCAGGTACTTCTACCCCTGAAAGCGG |
| | CTCCGCTTCTCCAGGTTCCACTAGCTCTACCGCTGAATCTCCGGGTCCAGGTTCTACTA |
| | GCTCTACTGCAGAATCTCCTGGCCCAGGTACCTCTACTCCGGAAAGCGGCTCTGCATC |
| | TCCAGGTACTTCTACCCCTGAAAGCGGTTCTGCATCTCCAGGTTCTACTAGCGAATCCC |
| | CGTCTGGTACCGCACCAGGTACTTCTACCCCGGAAAGCGGCTCTGCTTCTCCAGGTAC |
| | TTCTACCCCGGAAAGCGGCTCCGCATCTCCAGGTTCTACTAGCGAATCTCCTTCTGGTA |
| | CCGCTCCAGGTTCTACCAGCGAATCCCCGTCTGGTACTGCTCCAGGTTCTACCAGCGA |
| | ATCTCCTTCTGGTACTGCACCAGGTTCTACTAGCTCTACTGCAGAATCTCCTGGCCCAG |
| | GTACCTCTACTCCGGAAAGCGGCTCTGCATCTCCAGGTACTTCTACCCCTGAAAGCGG |
| | TTCTGCATCTCCAGGTTCTACTAGCGAATCTCCTTCTGGCACTGCACCAGGTTCTACCA |
| | GCGAATCTCCGTCTGGCACTGCACCAGGTACCTCTACCCCTGAAAGCGGTTCCGCTTCT |
| | CCAGGTTCTACTAGCGAATCTCCTTCTGGCACTGCACCAGGTTCTACCAGCGAATCTCC |
| | GTCTGGCACTGCACCAGGTACCTCTACCCCTGAAAGCGGTTCCGCTTCTCCAGGTACTT |
| | CTCCGAGCGGTGAATCTTCTACCGCACCAGGTTCTACTAGCTCTACCGCTGAATCTCCG |
| | GGCCCAGGTACTTCTCCGAGCGGTGAATCTTCTACTGCTCCAGGTTCCACTAGCTCTAC |
| | TGCTGAATCTCCTGGCCCAGGTACTTCTACTCCGGAAAGCGGTTCCGCTTCTCCAGGTT |
| | CTACTAGCGAATCTCCGTCTGGCACCGCACCAGGTTCTACTAGCTCTACTGCAGAATCT |
| | CCTGGCCCAGGTACCTCTACTCCGGAAAGCGGCTCTGCATCTCCAGGTACTTCTACCCC |
| | TGAAAGCGGTTCTGCATCTCCA |
| AE624 | ATGGCTGAACCTGCTGGCTCTCCAACCTCCACTGAGGAAGGTACCCCGGGTAGCGGTA |
| | CTGCTTCTTCCTCTCCAGGTAGCTCTACCCCTTCTGGTGCAACCGGCTCTCCAGGTGCT |
| | TCTCCGGGCACCAGCTCTACCGGTTCTCCAGGTAGCCCGGCTGGCTCTCCTACCTCTAC |
| | TGAGGAAGGTACTTCTGAAAGCGCTACTCCTGAGTCTGGTCCAGGTACCTCTACTGAA |
| | CCGTCCGAAGGTAGCGCTCCAGGTAGCCCAGCAGGCTCTCCGACTTCCACTGAGGAAG |
| | GTACTTCTACTGAACCTTCCGAAGGCAGCGCACCAGGTACCTCTACTGAACCTTCTGA |
| | GGGCAGCGCTCCAGGTACTTCTGAAAGCGCTACCCCGGAATCTGGCCCAGGTAGCGA |
| | ACCGGCTACTTCTGGTTCTGAAACCCCAGGTAGCGAACCGGCTACCTCCGGTTCTGAA |
| | ACTCCAGGTAGCCCGGCAGGCTCTCCGACCTCTACTGAGGAAGGTACTTCTGAAAGCG |
| | CAACCCCGGAGTCCGGCCCAGGTACCTCTACCGAACCGTCTGAGGGCAGCGCACCAG |
| | GTACTTCTACCGAACCGTCCGAGGGTAGCGCACCAGGTAGCCCAGCAGGTTCTCCTAC |
| | CTCCACCGAGGAAGGTACTTCTACCGAACCGTCCGAGGGTAGCGCACCAGGTACCTCT |
| | ACTGAACCTTCTGAGGGCAGCGCTCCAGGTACTTCTGAAAGCGCTACCCCGGAGTCCG |
| | GTCCAGGTACTTCTACTGAACCGTCCGAAGGTAGCGCACCAGGTACTTCTGAAAGCGC |
| | AACCCCTGAATCCGGTCCAGGTAGCGAACCGGCTACTTCTGGCTCTGAGACTCCAGGT |
| | ACTTCTACCGAACCGTCCGAAGGTAGCGCACCAGGTACTTCTACTGAACCGTCTGAAG |
| | GTAGCGCACCAGGTACTTCTGAAAGCGCAACCCCGGAATCCGGCCCAGGTACCTCTGA |
| | AAGCGCAACCCCGGAGTCCGGCCCAGGTAGCCCTGCTGGCTCTCCAACCTCCACCGAA |
| | GAAGGTACCTCTGAAAGCGCAACCCCTGAATCCGGCCCAGGTAGCGAACCGGCAACC |
| | TCCGGTTCTGAAACCCCAGGTACCTCTGAAAGCGCTACTCCGGAGTCTGGCCCAGGTA |
| | CCTCTACTGAACCGTCTGAGGGTAGCGCTCCAGGTACTTCTACTGAACCGTCCGAAGG |
| | TAGCGCACCAGGTACTTCTACCGAACCGTCCGAAGGCAGCGCTCCAGGTACCTCTACT |
| | GAACCTTCCGAGGGCAGCGCTCCAGGTACCTCTACCGAACCTTCTGAAGGTAGCGCAC |
| | CAGGTACTTCTACCGAACCGTCCGAGGGTAGCGCACCAGGTAGCCCAGCAGGTTCTCC |
| | TACCTCCACCGAGGAAGGTACTTCTACCGAACCGTCCGAGGGTAGCGCACCAGGTACC |
| | TCTGAAAGCGCAACTCCTGAGTCTGGCCCAGGTAGCGAACCTGCTACCTCCGGCTCTG |
| | AGACTCCAGGTACCTCTGAAAGCGCAACCCCGGAATCTGGTCCAGGTAGCGAACCTGC |
| | AACCTCTGGCTCTGAAACCCCAGGTACCTCTGAAAGCGCTACTCCTGAATCTGGCCCA |
| | GGTACTTCTACTGAACCGTCCGAGGGCAGCGCACCAGGTACTTCTGAAAGCGCTACTC |
| | CTGAGTCCGGCCCAGGTAGCCCGGCTGGCTCTCCGACTTCCACCGAGGAAGGTAGCCC |
| | GGCTGGCTCTCCAACTTCTACTGAAGAAGGTAGCCCGGCAGGCTCTCCGACCTCTACT |
| | GAGGAAGGTACTTCTGAAAGCGCAACCCCGGAGTCCGGCCCAGGTACCTCTACCGAA |
| | CCGTCTGAGGGCAGCGCACCA |
| AM875 | GGTACTTCTACTGAACCGTCTGAAGGCAGCGCACCAGGTAGCGAACCGGCTACTTCCG |
| | GTTCTGAAACCCCAGGTAGCCCAGCAGGTTCTCCAACTTCTACTGAAGAAGGTTCTAC |
| | CAGCTCTACCGCAGAATCTCCTGGTCCAGGTACCTCTACTCCGGAAAGCGGCTCTGCA |
| | TCTCCAGGTTCTACTAGCGAATCTCCTTCTGGCACTGCACCAGGTTCTACTAGCGAATC |
| | CCCGTCTGGTACTGCTCCAGGTACTTCTACTCCTGAAAGCGGTTCCGCTTCTCCAGGTA |
| | CCTCTACTCCGGAAAGCGGTTCTGCATCTCCAGGTAGCGAACCGGCAACCTCCGGCTC |
| | TGAAACCCCAGGTACCTCTGAAAGCGCTACTCCTGAATCCGGCCCAGGTAGCCCGGCA |
| | GGTTCTCCGACTTCCACTGAGGAAGGTACCTCTACTGAACCTTCTGAGGGCAGCGCTC |
| | CAGGTACTTCTGAAAGCGCTACCCCGGAGTCCGGTCCAGGTACTTCTACTGAACCGTC |
| | CGAAGGTAGCGCACCAGGTACTTCTACCGAACCGTCCGAGGGTAGCGCACCAGGTAG |
| | CCCAGCAGGTTCTCCTACCTCCACCGAGGAAGGTACTTCTACCGAACCGTCCGAGGGT |
| | AGCGCACCAGGTACTTCTACCGAACCTTCCGAGGGCAGCGCACCAGGTACTTCTGAAA |
| | GCGCTACCCCTGAGTCCGGCCCAGGTACTTCTGAAAGCGCTACTCCTGAATCCGGTCC |
| | AGGTACCTCTACTGAACCTTCCGAAGGCAGCGCTCCAGGTACCTCTACCGAACCGTCC |
| | GAGGGCAGCGCACCAGGTACTTCTGAAAGCGCAACCCCTGAATCCGGTCCAGGTACTT |
| | CTACTGAACCTTCCGAAGGTAGCGCTCCAGGTAGCGAACCTGCTACTTCTGGTTCTGA |
| | AACCCCAGGTAGCCCGGCTGGCTCTCCGACCTCCACCGAGGAAGGTAGCTCTACCCCG |
| | TCTGGTGCTACTGGTTCTCCAGGTACTCCGGGCAGCGGTACTGCTTCTTCCTCTCCAGG |
| | TAGCTCTACCCCTTCTGGTGCTACTGGCTCTCCAGGTACCTCTACCGAACCGTCCGAGG |
| | GTAGCGCACCAGGTACCTCTACTGAACCGTCTGAGGGTAGCGCTCCAGGTAGCGAACC |
| | GGCAACCTCCGGTTCTGAAACTCCAGGTAGCCCTGCTGGCTCTCCGACTTCTACTGAG |
| | GAAGGTAGCCCGGCTGGTTCTCCGACTTCTACTGAGGAAGGTACTTCTACCGAACCTT |
| | CCGAAGGTAGCGCTCCAGGTGCAAGCGCAAGCGGCGCGCCAAGCACGGGAGGTACTT |
| | CTGAAAGCGCTACTCCTGAGTCCGGCCCAGGTAGCCCGGCTGGCTCTCCGACTTCCAC |
| | CGAGGAAGGTAGCCCGGCTGGCTCTCCAACTTCTACTGAAGAAGGTTCTACCAGCTCT |
| | ACCGCTGAATCTCCTGGCCCAGGTTCTACTAGCGAATCTCCGTCTGGCACCGCACCAG |
| | GTACTTCCCCTAGCGGTGAATCTTCTACTGCACCAGGTACCCCTGGCAGCGGTACCGC |
| | TTCTTCCTCTCCAGGTAGCTCTACCCCGTCTGGTGCTACTGGCTCTCCAGGTTCTAGCC |
| | CGTCTGCATCTACCGGTACCGGCCCAGGTAGCGAACCGGCAACCTCCGGCTCTGAAAC |
| | TCCAGGTACTTCTGAAAGCGCTACTCCGGAATCCGGCCCAGGTAGCGAACCGGCTACT |
| | TCCGGCTCTGAAACCCCAGGTTCCACCAGCTCTACTGCAGAATCTCCGGGCCCAGGTT |
| | CTACTAGCTCTACTGCAGAATCTCCGGGTCCAGGTACTTCTCCTAGCGGCGAATCTTCT |
| | ACCGCTCCAGGTAGCGAACCGGCAACCTCTGGCTCTGAAACTCCAGGTAGCGAACCTG |
| | CAACCTCCGGCTCTGAAACCCCAGGTACTTCTACTGAACCTTCTGAGGGCAGCGCACC |
| | AGGTTCTACCAGCTCTACCGCAGAATCTCCTGGTCCAGGTACCTCTACTCCGGAAAGC |
| | GGCTCTGCATCTCCAGGTTCTACTAGCGAATCTCCTTCTGGCACTGCACCAGGTACTTC |
| | TACCGAACCGTCCGAAGGCAGCGCTCCAGGTACCTCTACTGAACCTTCCGAGGGCAGC |
| | GCTCCAGGTACCTCTACCGAACCTTCTGAAGGTAGCGCACCAGGTAGCTCTACTCCGT |
| | CTGGTGCAACCGGCTCCCCAGGTTCTAGCCCGTCTGCTTCCACTGGTACTGGCCCAGGT |
| | GCTTCCCCGGGCACCAGCTCTACTGGTTCTCCAGGTAGCGAACCTGCTACCTCCGGTTC |
| | TGAAACCCCAGGTACCTCTGAAAGCGCAACTCCGGAGTCTGGTCCAGGTAGCCCTGCA |
| | GGTTCTCCTACCTCCACTGAGGAAGGTAGCTCTACTCCGTCTGGTGCAACCGGCTCCCC |
| | AGGTTCTAGCCCGTCTGCTTCCACTGGTACTGGCCCAGGTGCTTCCCCGGGCACCAGCT |
| | CTACTGGTTCTCCAGGTACCTCTGAAAGCGCTACTCCGGAGTCTGGCCCAGGTACCTCT |
| | ACTGAACCGTCTGAGGGTAGCGCTCCAGGTACTTCTACTGAACCGTCCGAAGGTAGCG |
| | CACCA |
| AE864 | GGTAGCCCGGCTGGCTCTCCTACCTCTACTGAGGAAGGTACTTCTGAAAGCGCTACTC |
| | CTGAGTCTGGTCCAGGTACCTCTACTGAACCGTCCGAAGGTAGCGCTCCAGGTAGCCC |
| | AGCAGGCTCTCCGACTTCCACTGAGGAAGGTACTTCTACTGAACCTTCCGAAGGCAGC |
| | GCACCAGGTACCTCTACTGAACCTTCTGAGGGCAGCGCTCCAGGTACTTCTGAAAGCG |
| | CTACCCCGGAATCTGGCCCAGGTAGCGAACCGGCTACTTCTGGTTCTGAAACCCCAGG |
| | TAGCGAACCGGCTACCTCCGGTTCTGAAACTCCAGGTAGCCCGGCAGGCTCTCCGACC |
| | TCTACTGAGGAAGGTACTTCTGAAAGCGCAACCCCGGAGTCCGGCCCAGGTACCTCTA |
| | CCGAACCGTCTGAGGGCAGCGCACCAGGTACTTCTACCGAACCGTCCGAGGGTAGCG |
| | CACCAGGTAGCCCAGCAGGTTCTCCTACCTCCACCGAGGAAGGTACTTCTACCGAACC |
| | GTCCGAGGGTAGCGCACCAGGTACCTCTACTGAACCTTCTGAGGGCAGCGCTCCAGGT |
| | ACTTCTGAAAGCGCTACCCCGGAGTCCGGTCCAGGTACTTCTACTGAACCGTCCGAAG |
| | GTAGCGCACCAGGTACTTCTGAAAGCGCAACCCCTGAATCCGGTCCAGGTAGCGAACC |
| | GGCTACTTCTGGCTCTGAGACTCCAGGTACTTCTACCGAACCGTCCGAAGGTAGCGCA |
| | CCAGGTACTTCTACTGAACCGTCTGAAGGTAGCGCACCAGGTACTTCTGAAAGCGCAA |
| | CCCCGGAATCCGGCCCAGGTACCTCTGAAAGCGCAACCCCGGAGTCCGGCCCAGGTA |
| | GCCCTGCTGGCTCTCCAACCTCCACCGAAGAAGGTACCTCTGAAAGCGCAACCCCTGA |
| | ATCCGGCCCAGGTAGCGAACCGGCAACCTCCGGTTCTGAAACCCCAGGTACCTCTGAA |
| | AGCGCTACTCCGGAGTCTGGCCCAGGTACCTCTACTGAACCGTCTGAGGGTAGCGCTC |
| | CAGGTACTTCTACTGAACCGTCCGAAGGTAGCGCACCAGGTACTTCTACCGAACCGTC |
| | CGAAGGCAGCGCTCCAGGTACCTCTACTGAACCTTCCGAGGGCAGCGCTCCAGGTACC |
| | TCTACCGAACCTTCTGAAGGTAGCGCACCAGGTACTTCTACCGAACCGTCCGAGGGTA |
| | GCGCACCAGGTAGCCCAGCAGGTTCTCCTACCTCCACCGAGGAAGGTACTTCTACCGA |
| | ACCGTCCGAGGGTAGCGCACCAGGTACCTCTGAAAGCGCAACTCCTGAGTCTGGCCCA |
| | GGTAGCGAACCTGCTACCTCCGGCTCTGAGACTCCAGGTACCTCTGAAAGCGCAACCC |
| | CGGAATCTGGTCCAGGTAGCGAACCTGCAACCTCTGGCTCTGAAACCCCAGGTACCTC |
| | TGAAAGCGCTACTCCTGAATCTGGCCCAGGTACTTCTACTGAACCGTCCGAGGGCAGC |
| | GCACCAGGTACTTCTGAAAGCGCTACTCCTGAGTCCGGCCCAGGTAGCCCGGCTGGCT |
| | CTCCGACTTCCACCGAGGAAGGTAGCCCGGCTGGCTCTCCAACTTCTACTGAAGAAGG |
| | TAGCCCGGCAGGCTCTCCGACCTCTACTGAGGAAGGTACTTCTGAAAGCGCAACCCCG |
| | GAGTCCGGCCCAGGTACCTCTACCGAACCGTCTGAGGGCAGCGCACCAGGTACCTCTG |
| | AAAGCGCAACTCCTGAGTCTGGCCCAGGTAGCGAACCTGCTACCTCCGGCTCTGAGAC |
| | TCCAGGTACCTCTGAAAGCGCAACCCCGGAATCTGGTCCAGGTAGCGAACCTGCAACC |
| | TCTGGCTCTGAAACCCCAGGTACCTCTGAAAGCGCTACTCCTGAATCTGGCCCAGGTA |
| | CTTCTACTGAACCGTCCGAGGGCAGCGCACCAGGTAGCCCTGCTGGCTCTCCAACCTC |
| | CACCGAAGAAGGTACCTCTGAAAGCGCAACCCCTGAATCCGGCCCAGGTAGCGAACC |
| | GGCAACCTCCGGTTCTGAAACCCCAGGTACTTCTGAAAGCGCTACTCCTGAGTCCGGC |
| | CCAGGTAGCCCGGCTGGCTCTCCGACTTCCACCGAGGAAGGTAGCCCGGCTGGCTCTC |
| | CAACTTCTACTGAAGAAGGTACTTCTACCGAACCTTCCGAGGGCAGCGCACCAGGTAC |
| | TTCTGAAAGCGCTACCCCTGAGTCCGGCCCAGGTACTTCTGAAAGCGCTACTCCTGAA |
| | TCCGGTCCAGGTACTTCTGAAAGCGCTACCCCGGAATCTGGCCCAGGTAGCGAACCGG |
| | CTACTTCTGGTTCTGAAACCCCAGGTAGCGAACCGGCTACCTCCGGTTCTGAAACTCC |
| | AGGTAGCCCAGCAGGCTCTCCGACTTCCACTGAGGAAGGTACTTCTACTGAACCTTCC |
| | GAAGGCAGCGCACCAGGTACCTCTACTGAACCTTCTGAGGGCAGCGCTCCAGGTAGC |
| | GAACCTGCAACCTCTGGCTCTGAAACCCCAGGTACCTCTGAAAGCGCTACTCCTGAAT |
| | CTGGCCCAGGTACTTCTACTGAACCGTCCGAGGGCAGCGCACCA |
| AF864 | GGTTCTACCAGCGAATCTCCTTCTGGCACCGCTCCAGGTACCTCTCCTAGCGGCGAATC |
| | TTCTACCGCTCCAGGTTCTACTAGCGAATCTCCTTCTGGCACTGCACCAGGTTCTACTA |
| | GCGAATCCCCGTCTGGTACTGCTCCAGGTACTTCTACTCCTGAAAGCGGTTCCGCTTCT |
| | CCAGGTACCTCTACTCCGGAAAGCGGTTCTGCATCTCCAGGTTCTACCAGCGAATCTC |
| | CTTCTGGCACCGCTCCAGGTTCTACTAGCGAATCCCCGTCTGGTACCGCACCAGGTACT |
| | TCTCCTAGCGGCGAATCTTCTACCGCACCAGGTTCTACTAGCGAATCTCCGTCTGGCAC |
| | TGCTCCAGGTACTTCTCCTAGCGGTGAATCTTCTACCGCTCCAGGTACTTCCCCTAGCG |
| | GCGAATCTTCTACCGCTCCAGGTTCTACTAGCTCTACTGCAGAATCTCCGGGCCCAGGT |
| | ACCTCTCCTAGCGGTGAATCTTCTACCGCTCCAGGTACTTCTCCGAGCGGTGAATCTTC |
| | TACCGCTCCAGGTTCTACTAGCTCTACTGCAGAATCTCCTGGCCCAGGTACCTCTACTC |
| | CGGAAAGCGGCTCTGCATCTCCAGGTACTTCTACCCCTGAAAGCGGTTCTGCATCTCC |
| | AGGTTCTACTAGCGAATCTCCTTCTGGCACTGCACCAGGTTCTACCAGCGAATCTCCGT |
| | CTGGCACTGCACCAGGTACCTCTACCCCTGAAAGCGGTTCCGCTTCTCCAGGTTCTACC |
| | AGCTCTACCGCAGAATCTCCTGGTCCAGGTACCTCTACTCCGGAAAGCGGCTCTGCAT |
| | CTCCAGGTTCTACTAGCGAATCTCCTTCTGGCACTGCACCAGGTACTTCTCCGAGCGGT |
| | GAATCTTCTACCGCACCAGGTTCTACTAGCTCTACCGCTGAATCTCCGGGCCCAGGTA |
| | CTTCTCCGAGCGGTGAATCTTCTACTGCTCCAGGTACCTCTACTCCTGAAAGCGGTTCT |
| | GCATCTCCAGGTTCCACTAGCTCTACCGCAGAATCTCCGGGCCCAGGTTCTACTAGCTC |
| | TACTGCTGAATCTCCTGGCCCAGGTTCTACTAGCTCTACTGCTGAATCTCCGGGTCCAG |
| | GTTCTACCAGCTCTACTGCTGAATCTCCTGGTCCAGGTACCTCCCCGAGCGGTGAATCT |
| | TCTACTGCACCAGGTTCTACTAGCGAATCTCCTTCTGGCACTGCACCAGGTTCTACCAG |
| | CGAATCTCCGTCTGGCACTGCACCAGGTACCTCTACCCCTGAAAGCGGTCCXXXXXXX |
| | XXXXXTGCAAGCGCAAGCGGCGCGCCAAGCACGGGAXXXXXXXXTAGCGAATCTCCT |
| | TCTGGTACCGCTCCAGGTTCTACCAGCGAATCCCCGTCTGGTACTGCTCCAGGTTCTAC |
| | CAGCGAATCTCCTTCTGGTACTGCACCAGGTTCTACTAGCGAATCTCCTTCTGGTACCG |
| | CTCCAGGTTCTACCAGCGAATCCCCGTCTGGTACTGCTCCAGGTTCTACCAGCGAATCT |
| | CCTTCTGGTACTGCACCAGGTACTTCTACTCCGGAAAGCGGTTCCGCATCTCCAGGTAC |
| | TTCTCCTAGCGGTGAATCTTCTACTGCTCCAGGTACCTCTCCTAGCGGCGAATCTTCTA |
| | CTGCTCCAGGTTCTACCAGCTCTACTGCTGAATCTCCGGGTCCAGGTACTTCCCCGAGC |
| | GGTGAATCTTCTACTGCACCAGGTACTTCTACTCCGGAAAGCGGTTCCGCTTCTCCAGG |
| | TTCTACCAGCGAATCTCCTTCTGGCACCGCTCCAGGTTCTACTAGCGAATCCCCGTCTG |
| | GTACCGCACCAGGTACTTCTCCTAGCGGCGAATCTTCTACCGCACCAGGTTCTACTAG |
| | CGAATCCCCGTCTGGTACCGCACCAGGTACTTCTACCCCGGAAAGCGGCTCTGCTTCT |
| | CCAGGTACTTCTACCCCGGAAAGCGGCTCCGCATCTCCAGGTTCTACTAGCGAATCTC |
| | CTTCTGGTACCGCTCCAGGTACTTCTACCCCTGAAAGCGGCTCCGCTTCTCCAGGTTCC |
| | ACTAGCTCTACCGCTGAATCTCCGGGTCCAGGTTCTACCAGCGAATCTCCTTCTGGCAC |
| | CGCTCCAGGTTCTACTAGCGAATCCCCGTCTGGTACCGCACCAGGTACTTCTCCTAGCG |
| | GCGAATCTTCTACCGCACCAGGTTCTACCAGCTCTACTGCTGAATCTCCGGGTCCAGGT |
| | ACTTCCCCGAGCGGTGAATCTTCTACTGCACCAGGTACTTCTACTCCGGAAAGCGGTT |
| | CCGCTTCTCCAGGTACCTCCCCTAGCGGCGAATCTTCTACTGCTCCAGGTACCTCTCCT |
| | AGCGGCGAATCTTCTACCGCTCCAGGTACCTCCCCTAGCGGTGAATCTTCTACCGCAC |
| | CAGGTTCTACTAGCTCTACTGCTGAATCTCCGGGTCCAGGTTCTACCAGCTCTACTGCT |
| | GAATCTCCTGGTCCAGGTACCTCCCCGAGCGGTGAATCTTCTACTGCACCAGGTTCTA |
| | GCCCTTCTGCTTCCACCGGTACCGGCCCAGGTAGCTCTACTCCGTCTGGTGCAACTGGC |
| | TCTCCAGGTAGCTCTACTCCGTCTGGTGCAACCGGCTCCCCA |
| | XXXX was inserted in two areas where no sequence information is available. |
| AG864 | GGTGCTTCCCCGGGCACCAGCTCTACTGGTTCTCCAGGTTCTAGCCCGTCTGCTTCTAC |
| | TGGTACTGGTCCAGGTTCTAGCCCTTCTGCTTCCACTGGTACTGGTCCAGGTACCCCGG |
| | GTAGCGGTACCGCTTCTTCTTCTCCAGGTAGCTCTACTCCGTCTGGTGCTACCGGCTCT |
| | CCAGGTTCTAACCCTTCTGCATCCACCGGTACCGGCCCAGGTGCTTCTCCGGGCACCA |
| | GCTCTACTGGTTCTCCAGGTACCCCGGGCAGCGGTACCGCATCTTCTTCTCCAGGTAGC |
| | TCTACTCCTTCTGGTGCAACTGGTTCTCCAGGTACTCCTGGCAGCGGTACCGCTTCTTC |
| | TTCTCCAGGTGCTTCTCCTGGTACTAGCTCTACTGGTTCTCCAGGTGCTTCTCCGGGCA |
| | CTAGCTCTACTGGTTCTCCAGGTACCCCGGGTAGCGGTACTGCTTCTTCCTCTCCAGGT |
| | AGCTCTACCCCTTCTGGTGCAACCGGCTCTCCAGGTGCTTCTCCGGGCACCAGCTCTAC |
| | CGGTTCTCCAGGTACCCCGGGTAGCGGTACCGCTTCTTCTTCTCCAGGTAGCTCTACTC |
| | CGTCTGGTGCTACCGGCTCTCCAGGTTCTAACCCTTCTGCATCCACCGGTACCGGCCCA |
| | GGTTCTAGCCCTTCTGCTTCCACCGGTACTGGCCCAGGTAGCTCTACCCCTTCTGGTGC |
| | TACCGGCTCCCCAGGTAGCTCTACTCCTTCTGGTGCAACTGGCTCTCCAGGTGCATCTC |
| | CGGGCACTAGCTCTACTGGTTCTCCAGGTGCATCCCCTGGCACTAGCTCTACTGGTTCT |
| | CCAGGTGCTTCTCCTGGTACCAGCTCTACTGGTTCTCCAGGTACTCCTGGCAGCGGTAC |
| | CGCTTCTTCTTCTCCAGGTGCTTCTCCTGGTACTAGCTCTACTGGTTCTCCAGGTGCTTC |
| | TCCGGGCACTAGCTCTACTGGTTCTCCAGGTGCTTCCCCGGGCACTAGCTCTACCGGTT |
| | CTCCAGGTTCTAGCCCTTCTGCATCTACTGGTACTGGCCCAGGTACTCCGGGCAGCGGT |
| | ACTGCTTCTTCCTCTCCAGGTGCATCTCCGGGCACTAGCTCTACTGGTTCTCCAGGTGC |
| | ATCCCCTGGCACTAGCTCTACTGGTTCTCCAGGTGCTTCTCCTGGTACCAGCTCTACTG |
| | GTTCTCCAGGTAGCTCTACTCCGTCTGGTGCAACCGGTTCCCCAGGTAGCTCTACTCCT |
| | TCTGGTGCTACTGGCTCCCCAGGTGCATCCCCTGGCACCAGCTCTACCGGTTCTCCAGG |
| | TACCCCGGGCAGCGGTACCGCATCTTCCTCTCCAGGTAGCTCTACCCCGTCTGGTGCTA |
| | CCGGTTCCCCAGGTAGCTCTACCCCGTCTGGTGCAACCGGCTCCCCAGGTAGCTCTACT |
| | CCGTCTGGTGCAACCGGCTCCCCAGGTTCTAGCCCGTCTGCTTCCACTGGTACTGGCCC |
| | AGGTGCTTCCCCGGGCACCAGCTCTACTGGTTCTCCAGGTGCATCCCCGGGTACCAGC |
| | TCTACCGGTTCTCCAGGTACTCCTGGCAGCGGTACTGCATCTTCCTCTCCAGGTGCTTC |
| | TCCGGGCACCAGCTCTACTGGTTCTCCAGGTGCATCTCCGGGCACTAGCTCTACTGGTT |
| | CTCCAGGTGCATCCCCTGGCACTAGCTCTACTGGTTCTCCAGGTGCTTCTCCTGGTACC |
| | AGCTCTACTGGTTCTCCAGGTACCCCTGGTAGCGGTACTGCTTCTTCCTCTCCAGGTAG |
| | CTCTACTCCGTCTGGTGCTACCGGTTCTCCAGGTACCCCGGGTAGCGGTACCGCATCTT |
| | CTTCTCCAGGTAGCTCTACCCCGTCTGGTGCTACTGGTTCTCCAGGTACTCCGGGCAGC |
| | GGTACTGCTTCTTCCTCTCCAGGTAGCTCTACCCCTTCTGGTGCTACTGGCTCTCCAGG |
| | TAGCTCTACCCCGTCTGGTGCTACTGGCTCCCCAGGTTCTAGCCCTTCTGCATCCACCG |
| | GTACCGGTCCAGGTTCTAGCCCGTCTGCATCTACTGGTACTGGTCCAGGTGCATCCCCG |
| | GGCACTAGCTCTACCGGTTCTCCAGGTACTCCTGGTAGCGGTACTGCTTCTTCTTCTCC |
| | AGGTAGCTCTACTCCTTCTGGTGCTACTGGTTCTCCAGGTTCTAGCCCTTCTGCATCCA |
| | CCGGTACCGGCCCAGGTTCTAGCCCGTCTGCTTCTACCGGTACTGGTCCAGGTGCTTCT |
| | CCGGGTACTAGCTCTACTGGTTCTCCAGGTGCATCTCCTGGTACTAGCTCTACTGGTTC |
| | TCCAGGTAGCTCTACTCCGTCTGGTGCAACCGGCTCTCCAGGTTCTAGCCCTTCTGCAT |
| | CTACCGGTACTGGTCCAGGTGCATCCCCTGGTACCAGCTCTACCGGTTCTCCAGGTTCT |
| | AGCCCTTCTGCTTCTACCGGTACCGGTCCAGGTACCCCTGGCAGCGGTACCGCATCTTC |
| | CTCTCCAGGTAGCTCTACTCCGTCTGGTGCAACCGGTTCCCCAGGTAGCTCTACTCCTT |
| | CTGGTGCTACTGGCTCCCCAGGTGCATCCCCTGGCACCAGCTCTACCGGTTCTCCA |
| AM923 | ATGGCTGAACCTGCTGGCTCTCCAACCTCCACTGAGGAAGGTGCATCCCCGGGCACCA |
| | GCTCTACCGGTTCTCCAGGTAGCTCTACCCCGTCTGGTGCTACCGGCTCTCCAGGTAGC |
| | TCTACCCCGTCTGGTGCTACTGGCTCTCCAGGTACTTCTACTGAACCGTCTGAAGGCAG |
| | CGCACCAGGTAGCGAACCGGCTACTTCCGGTTCTGAAACCCCAGGTAGCCCAGCAGGT |
| | TCTCCAACTTCTACTGAAGAAGGTTCTACCAGCTCTACCGCAGAATCTCCTGGTCCAG |
| | GTACCTCTACTCCGGAAAGCGGCTCTGCATCTCCAGGTTCTACTAGCGAATCTCCTTCT |
| | GGCACTGCACCAGGTTCTACTAGCGAATCCCCGTCTGGTACTGCTCCAGGTACTTCTAC |
| | TCCTGAAAGCGGTTCCGCTTCTCCAGGTACCTCTACTCCGGAAAGCGGTTCTGCATCTC |
| | CAGGTAGCGAACCGGCAACCTCCGGCTCTGAAACCCCAGGTACCTCTGAAAGCGCTAC |
| | TCCTGAATCCGGCCCAGGTAGCCCGGCAGGTTCTCCGACTTCCACTGAGGAAGGTACC |
| | TCTACTGAACCTTCTGAGGGCAGCGCTCCAGGTACTTCTGAAAGCGCTACCCCGGAGT |
| | CCGGTCCAGGTACTTCTACTGAACCGTCCGAAGGTAGCGCACCAGGTACTTCTACCGA |
| | ACCGTCCGAGGGTAGCGCACCAGGTAGCCCAGCAGGTTCTCCTACCTCCACCGAGGAA |
| | GGTACTTCTACCGAACCGTCCGAGGGTAGCGCACCAGGTACTTCTACCGAACCTTCCG |
| | AGGGCAGCGCACCAGGTACTTCTGAAAGCGCTACCCCTGAGTCCGGCCCAGGTACTTC |
| | TGAAAGCGCTACTCCTGAATCCGGTCCAGGTACCTCTACTGAACCTTCCGAAGGCAGC |
| | GCTCCAGGTACCTCTACCGAACCGTCCGAGGGCAGCGCACCAGGTACTTCTGAAAGCG |
| | CAACCCCTGAATCCGGTCCAGGTACTTCTACTGAACCTTCCGAAGGTAGCGCTCCAGG |
| | TAGCGAACCTGCTACTTCTGGTTCTGAAACCCCAGGTAGCCCGGCTGGCTCTCCGACC |
| | TCCACCGAGGAAGGTAGCTCTACCCCGTCTGGTGCTACTGGTTCTCCAGGTACTCCGG |
| | GCAGCGGTACTGCTTCTTCCTCTCCAGGTAGCTCTACCCCTTCTGGTGCTACTGGCTCT |
| | CCAGGTACCTCTACCGAACCGTCCGAGGGTAGCGCACCAGGTACCTCTACTGAACCGT |
| | CTGAGGGTAGCGCTCCAGGTAGCGAACCGGCAACCTCCGGTTCTGAAACTCCAGGTAG |
| | CCCTGCTGGCTCTCCGACTTCTACTGAGGAAGGTAGCCCGGCTGGTTCTCCGACTTCTA |
| | CTGAGGAAGGTACTTCTACCGAACCTTCCGAAGGTAGCGCTCCAGGTGCAAGCGCAA |
| | GCGGCGCGCCAAGCACGGGAGGTACTTCTGAAAGCGCTACTCCTGAGTCCGGCCCAG |
| | GTAGCCCGGCTGGCTCTCCGACTTCCACCGAGGAAGGTAGCCCGGCTGGCTCTCCAAC |
| | TTCTACTGAAGAAGGTTCTACCAGCTCTACCGCTGAATCTCCTGGCCCAGGTTCTACTA |
| | GCGAATCTCCGTCTGGCACCGCACCAGGTACTTCCCCTAGCGGTGAATCTTCTACTGC |
| | ACCAGGTACCCCTGGCAGCGGTACCGCTTCTTCCTCTCCAGGTAGCTCTACCCCGTCTG |
| | GTGCTACTGGCTCTCCAGGTTCTAGCCCGTCTGCATCTACCGGTACCGGCCCAGGTAG |
| | CGAACCGGCAACCTCCGGCTCTGAAACTCCAGGTACTTCTGAAAGCGCTACTCCGGAA |
| | TCCGGCCCAGGTAGCGAACCGGCTACTTCCGGCTCTGAAACCCCAGGTTCCACCAGCT |
| | CTACTGCAGAATCTCCGGGCCCAGGTTCTACTAGCTCTACTGCAGAATCTCCGGGTCC |
| | AGGTACTTCTCCTAGCGGCGAATCTTCTACCGCTCCAGGTAGCGAACCGGCAACCTCT |
| | GGCTCTGAAACTCCAGGTAGCGAACCTGCAACCTCCGGCTCTGAAACCCCAGGTACTT |
| | CTACTGAACCTTCTGAGGGCAGCGCACCAGGTTCTACCAGCTCTACCGCAGAATCTCC |
| | TGGTCCAGGTACCTCTACTCCGGAAAGCGGCTCTGCATCTCCAGGTTCTACTAGCGAA |
| | TCTCCTTCTGGCACTGCACCAGGTACTTCTACCGAACCGTCCGAAGGCAGCGCTCCAG |
| | GTACCTCTACTGAACCTTCCGAGGGCAGCGCTCCAGGTACCTCTACCGAACCTTCTGA |
| | AGGTAGCGCACCAGGTAGCTCTACTCCGTCTGGTGCAACCGGCTCCCCAGGTTCTAGC |
| | CCGTCTGCTTCCACTGGTACTGGCCCAGGTGCTTCCCCGGGCACCAGCTCTACTGGTTC |
| | TCCAGGTAGCGAACCTGCTACCTCCGGTTCTGAAACCCCAGGTACCTCTGAAAGCGCA |
| | ACTCCGGAGTCTGGTCCAGGTAGCCCTGCAGGTTCTCCTACCTCCACTGAGGAAGGTA |
| | GCTCTACTCCGTCTGGTGCAACCGGCTCCCCAGGTTCTAGCCCGTCTGCTTCCACTGGT |
| | ACTGGCCCAGGTGCTTCCCCGGGCACCAGCTCTACTGGTTCTCCAGGTACCTCTGAAA |
| | GCGCTACTCCGGAGTCTGGCCCAGGTACCTCTACTGAACCGTCTGAGGGTAGCGCTCC |
| | AGGTACTTCTACTGAACCGTCCGAAGGTAGCGCACCA |
| AE912 | ATGGCTGAACCTGCTGGCTCTCCAACCTCCACTGAGGAAGGTACCCCGGGTAGCGGTA |
| | CTGCTTCTTCCTCTCCAGGTAGCTCTACCCCTTCTGGTGCAACCGGCTCTCCAGGTGCT |
| | TCTCCGGGCACCAGCTCTACCGGTTCTCCAGGTAGCCCGGCTGGCTCTCCTACCTCTAC |
| | TGAGGAAGGTACTTCTGAAAGCGCTACTCCTGAGTCTGGTCCAGGTACCTCTACTGAA |
| | CCGTCCGAAGGTAGCGCTCCAGGTAGCCCAGCAGGCTCTCCGACTTCCACTGAGGAAG |
| | GTACTTCTACTGAACCTTCCGAAGGCAGCGCACCAGGTACCTCTACTGAACCTTCTGA |
| | GGGCAGCGCTCCAGGTACTTCTGAAAGCGCTACCCCGGAATCTGGCCCAGGTAGCGA |
| | ACCGGCTACTTCTGGTTCTGAAACCCCAGGTAGCGAACCGGCTACCTCCGGTTCTGAA |
| | ACTCCAGGTAGCCCGGCAGGCTCTCCGACCTCTACTGAGGAAGGTACTTCTGAAAGCG |
| | CAACCCCGGAGTCCGGCCCAGGTACCTCTACCGAACCGTCTGAGGGCAGCGCACCAG |
| | GTACTTCTACCGAACCGTCCGAGGGTAGCGCACCAGGTAGCCCAGCAGGTTCTCCTAC |
| | CTCCACCGAGGAAGGTACTTCTACCGAACCGTCCGAGGGTAGCGCACCAGGTACCTCT |
| | ACTGAACCTTCTGAGGGCAGCGCTCCAGGTACTTCTGAAAGCGCTACCCCGGAGTCCG |
| | GTCCAGGTACTTCTACTGAACCGTCCGAAGGTAGCGCACCAGGTACTTCTGAAAGCGC |
| | AACCCCTGAATCCGGTCCAGGTAGCGAACCGGCTACTTCTGGCTCTGAGACTCCAGGT |
| | ACTTCTACCGAACCGTCCGAAGGTAGCGCACCAGGTACTTCTACTGAACCGTCTGAAG |
| | GTAGCGCACCAGGTACTTCTGAAAGCGCAACCCCGGAATCCGGCCCAGGTACCTCTGA |
| | AAGCGCAACCCCGGAGTCCGGCCCAGGTAGCCCTGCTGGCTCTCCAACCTCCACCGAA |
| | GAAGGTACCTCTGAAAGCGCAACCCCTGAATCCGGCCCAGGTAGCGAACCGGCAACC |
| | TCCGGTTCTGAAACCCCAGGTACCTCTGAAAGCGCTACTCCGGAGTCTGGCCCAGGTA |
| | CCTCTACTGAACCGTCTGAGGGTAGCGCTCCAGGTACTTCTACTGAACCGTCCGAAGG |
| | TAGCGCACCAGGTACTTCTACCGAACCGTCCGAAGGCAGCGCTCCAGGTACCTCTACT |
| | GAACCTTCCGAGGGCAGCGCTCCAGGTACCTCTACCGAACCTTCTGAAGGTAGCGCAC |
| | CAGGTACTTCTACCGAACCGTCCGAGGGTAGCGCACCAGGTAGCCCAGCAGGTTCTCC |
| | TACCTCCACCGAGGAAGGTACTTCTACCGAACCGTCCGAGGGTAGCGCACCAGGTACC |
| | TCTGAAAGCGCAACTCCTGAGTCTGGCCCAGGTAGCGAACCTGCTACCTCCGGCTCTG |
| | AGACTCCAGGTACCTCTGAAAGCGCAACCCCGGAATCTGGTCCAGGTAGCGAACCTGC |
| | AACCTCTGGCTCTGAAACCCCAGGTACCTCTGAAAGCGCTACTCCTGAATCTGGCCCA |
| | GGTACTTCTACTGAACCGTCCGAGGGCAGCGCACCAGGTACTTCTGAAAGCGCTACTC |
| | CTGAGTCCGGCCCAGGTAGCCCGGCTGGCTCTCCGACTTCCACCGAGGAAGGTAGCCC |
| | GGCTGGCTCTCCAACTTCTACTGAAGAAGGTAGCCCGGCAGGCTCTCCGACCTCTACT |
| | GAGGAAGGTACTTCTGAAAGCGCAACCCCGGAGTCCGGCCCAGGTACCTCTACCGAA |
| | CCGTCTGAGGGCAGCGCACCAGGTACCTCTGAAAGCGCAACTCCTGAGTCTGGCCCAG |
| | GTAGCGAACCTGCTACCTCCGGCTCTGAGACTCCAGGTACCTCTGAAAGCGCAACCCC |
| | GGAATCTGGTCCAGGTAGCGAACCTGCAACCTCTGGCTCTGAAACCCCAGGTACCTCT |
| | GAAAGCGCTACTCCTGAATCTGGCCCAGGTACTTCTACTGAACCGTCCGAGGGCAGCG |
| | CACCAGGTAGCCCTGCTGGCTCTCCAACCTCCACCGAAGAAGGTACCTCTGAAAGCGC |
| | AACCCCTGAATCCGGCCCAGGTAGCGAACCGGCAACCTCCGGTTCTGAAACCCCAGGT |
| | ACTTCTGAAAGCGCTACTCCTGAGTCCGGCCCAGGTAGCCCGGCTGGCTCTCCGACTT |
| | CCACCGAGGAAGGTAGCCCGGCTGGCTCTCCAACTTCTACTGAAGAAGGTACTTCTAC |
| | CGAACCTTCCGAGGGCAGCGCACCAGGTACTTCTGAAAGCGCTACCCCTGAGTCCGGC |
| | CCAGGTACTTCTGAAAGCGCTACTCCTGAATCCGGTCCAGGTACTTCTGAAAGCGCTA |
| | CCCCGGAATCTGGCCCAGGTAGCGAACCGGCTACTTCTGGTTCTGAAACCCCAGGTAG |
| | CGAACCGGCTACCTCCGGTTCTGAAACTCCAGGTAGCCCAGCAGGCTCTCCGACTTCC |
| | ACTGAGGAAGGTACTTCTACTGAACCTTCCGAAGGCAGCGCACCAGGTACCTCTACTG |
| | AACCTTCTGAGGGCAGCGCTCCAGGTAGCGAACCTGCAACCTCTGGCTCTGAAACCCC |
| | AGGTACCTCTGAAAGCGCTACTCCTGAATCTGGCCCAGGTACTTCTACTGAACCGTCC |
| | GAGGGCAGCGCACCA |
| AM1318 | GGTACTTCTACTGAACCGTCTGAAGGCAGCGCACCAGGTAGCGAACCGGCTACTTCCG |
| | GTTCTGAAACCCCAGGTAGCCCAGCAGGTTCTCCAACTTCTACTGAAGAAGGTTCTAC |
| | CAGCTCTACCGCAGAATCTCCTGGTCCAGGTACCTCTACTCCGGAAAGCGGCTCTGCA |
| | TCTCCAGGTTCTACTAGCGAATCTCCTTCTGGCACTGCACCAGGTTCTACTAGCGAATC |
| | CCCGTCTGGTACTGCTCCAGGTACTTCTACTCCTGAAAGCGGTTCCGCTTCTCCAGGTA |
| | CCTCTACTCCGGAAAGCGGTTCTGCATCTCCAGGTAGCGAACCGGCAACCTCCGGCTC |
| | TGAAACCCCAGGTACCTCTGAAAGCGCTACTCCTGAATCCGGCCCAGGTAGCCCGGCA |
| | GGTTCTCCGACTTCCACTGAGGAAGGTACCTCTACTGAACCTTCTGAGGGCAGCGCTC |
| | CAGGTACTTCTGAAAGCGCTACCCCGGAGTCCGGTCCAGGTACTTCTACTGAACCGTC |
| | CGAAGGTAGCGCACCAGGTACTTCTACCGAACCGTCCGAGGGTAGCGCACCAGGTAG |
| | CCCAGCAGGTTCTCCTACCTCCACCGAGGAAGGTACTTCTACCGAACCGTCCGAGGGT |
| | AGCGCACCAGGTACTTCTACCGAACCTTCCGAGGGCAGCGCACCAGGTACTTCTGAAA |
| | GCGCTACCCCTGAGTCCGGCCCAGGTACTTCTGAAAGCGCTACTCCTGAATCCGGTCC |
| | AGGTACCTCTACTGAACCTTCCGAAGGCAGCGCTCCAGGTACCTCTACCGAACCGTCC |
| | GAGGGCAGCGCACCAGGTACTTCTGAAAGCGCAACCCCTGAATCCGGTCCAGGTACTT |
| | CTACTGAACCTTCCGAAGGTAGCGCTCCAGGTAGCGAACCTGCTACTTCTGGTTCTGA |
| | AACCCCAGGTAGCCCGGCTGGCTCTCCGACCTCCACCGAGGAAGGTAGCTCTACCCCG |
| | TCTGGTGCTACTGGTTCTCCAGGTACTCCGGGCAGCGGTACTGCTTCTTCCTCTCCAGG |
| | TAGCTCTACCCCTTCTGGTGCTACTGGCTCTCCAGGTACCTCTACCGAACCGTCCGAGG |
| | GTAGCGCACCAGGTACCTCTACTGAACCGTCTGAGGGTAGCGCTCCAGGTAGCGAACC |
| | GGCAACCTCCGGTTCTGAAACTCCAGGTAGCCCTGCTGGCTCTCCGACTTCTACTGAG |
| | GAAGGTAGCCCGGCTGGTTCTCCGACTTCTACTGAGGAAGGTACTTCTACCGAACCTT |
| | CCGAAGGTAGCGCTCCAGGTCCAGAACCAACGGGGCCGGCCCCAAGCGGAGGTAGCG |
| | AACCGGCAACCTCCGGCTCTGAAACCCCAGGTACCTCTGAAAGCGCTACTCCTGAATC |
| | CGGCCCAGGTAGCCCGGCAGGTTCTCCGACTTCCACTGAGGAAGGTACTTCTGAAAGC |
| | GCTACTCCTGAGTCCGGCCCAGGTAGCCCGGCTGGCTCTCCGACTTCCACCGAGGAAG |
| | GTAGCCCGGCTGGCTCTCCAACTTCTACTGAAGAAGGTACTTCTGAAAGCGCTACTCC |
| | TGAGTCCGGCCCAGGTAGCCCGGCTGGCTCTCCGACTTCCACCGAGGAAGGTAGCCCG |
| | GCTGGCTCTCCAACTTCTACTGAAGAAGGTTCTACCAGCTCTACCGCTGAATCTCCTGG |
| | CCCAGGTTCTACTAGCGAATCTCCGTCTGGCACCGCACCAGGTACTTCCCCTAGCGGT |
| | GAATCTTCTACTGCACCAGGTTCTACCAGCGAATCTCCTTCTGGCACCGCTCCAGGTTC |
| | TACTAGCGAATCCCCGTCTGGTACCGCACCAGGTACTTCTCCTAGCGGCGAATCTTCTA |
| | CCGCACCAGGTACTTCTACCGAACCTTCCGAGGGCAGCGCACCAGGTACTTCTGAAAG |
| | CGCTACCCCTGAGTCCGGCCCAGGTACTTCTGAAAGCGCTACTCCTGAATCCGGTCCA |
| | GGTAGCGAACCGGCAACCTCTGGCTCTGAAACCCCAGGTACCTCTGAAAGCGCTACTC |
| | CGGAATCTGGTCCAGGTACTTCTGAAAGCGCTACTCCGGAATCCGGTCCAGGTACCTC |
| | TACTGAACCTTCTGAGGGCAGCGCTCCAGGTACTTCTGAAAGCGCTACCCCGGAGTCC |
| | GGTCCAGGTACTTCTACTGAACCGTCCGAAGGTAGCGCACCAGGTACCTCCCCTAGCG |
| | GCGAATCTTCTACTGCTCCAGGTACCTCTCCTAGCGGCGAATCTTCTACCGCTCCAGGT |
| | ACCTCCCCTAGCGGTGAATCTTCTACCGCACCAGGTACTTCTACCGAACCGTCCGAGG |
| | GTAGCGCACCAGGTAGCCCAGCAGGTTCTCCTACCTCCACCGAGGAAGGTACTTCTAC |
| | CGAACCGTCCGAGGGTAGCGCACCAGGTTCTAGCCCTTCTGCTTCCACCGGTACCGGC |
| | CCAGGTAGCTCTACTCCGTCTGGTGCAACTGGCTCTCCAGGTAGCTCTACTCCGTCTGG |
| | TGCAACCGGCTCCCCAGGTAGCTCTACCCCGTCTGGTGCTACCGGCTCTCCAGGTAGC |
| | TCTACCCCGTCTGGTGCAACCGGCTCCCCAGGTGCATCCCCGGGTACTAGCTCTACCG |
| | GTTCTCCAGGTGCAAGCGCAAGCGGCGCGCCAAGCACGGGAGGTACTTCTCCGAGCG |
| | GTGAATCTTCTACCGCACCAGGTTCTACTAGCTCTACCGCTGAATCTCCGGGCCCAGGT |
| | ACTTCTCCGAGCGGTGAATCTTCTACTGCTCCAGGTACCTCTGAAAGCGCTACTCCGG |
| | AGTCTGGCCCAGGTACCTCTACTGAACCGTCTGAGGGTAGCGCTCCAGGTACTTCTAC |
| | TGAACCGTCCGAAGGTAGCGCACCAGGTTCTAGCCCTTCTGCATCTACTGGTACTGGC |
| | CCAGGTAGCTCTACTCCTTCTGGTGCTACCGGCTCTCCAGGTGCTTCTCCGGGTACTAG |
| | CTCTACCGGTTCTCCAGGTACTTCTACTCCGGAAAGCGGTTCCGCATCTCCAGGTACTT |
| | CTCCTAGCGGTGAATCTTCTACTGCTCCAGGTACCTCTCCTAGCGGCGAATCTTCTACT |
| | GCTCCAGGTACTTCTGAAAGCGCAACCCCTGAATCCGGTCCAGGTAGCGAACCGGCTA |
| | CTTCTGGCTCTGAGACTCCAGGTACTTCTACCGAACCGTCCGAAGGTAGCGCACCAGG |
| | TTCTACCAGCGAATCCCCTTCTGGTACTGCTCCAGGTTCTACCAGCGAATCCCCTTCTG |
| | GCACCGCACCAGGTACTTCTACCCCTGAAAGCGGCTCCGCTTCTCCAGGTAGCCCGGC |
| | AGGCTCTCCGACCTCTACTGAGGAAGGTACTTCTGAAAGCGCAACCCCGGAGTCCGGC |
| | CCAGGTACCTCTACCGAACCGTCTGAGGGCAGCGCACCAGGTAGCCCTGCTGGCTCTC |
| | CAACCTCCACCGAAGAAGGTACCTCTGAAAGCGCAACCCCTGAATCCGGCCCAGGTA |
| | GCGAACCGGCAACCTCCGGTTCTGAAACCCCAGGTAGCTCTACCCCGTCTGGTGCTAC |
| | CGGTTCCCCAGGTGCTTCTCCTGGTACTAGCTCTACCGGTTCTCCAGGTAGCTCTACCC |
| | CGTCTGGTGCTACTGGCTCTCCAGGTTCTACTAGCGAATCCCCGTCTGGTACTGCTCCA |
| | GGTACTTCCCCTAGCGGTGAATCTTCTACTGCTCCAGGTTCTACCAGCTCTACCGCAGA |
| | ATCTCCGGGTCCAGGTAGCTCTACCCCTTCTGGTGCAACCGGCTCTCCAGGTGCATCCC |
| | CGGGTACCAGCTCTACCGGTTCTCCAGGTACTCCGGGTAGCGGTACCGCTTCTTCCTCT |
| | CCAGGTAGCCCTGCTGGCTCTCCGACTTCTACTGAGGAAGGTAGCCCGGCTGGTTCTC |
| | CGACTTCTACTGAGGAAGGTACTTCTACCGAACCTTCCGAAGGTAGCGCTCCA |
| BC864 | GGTACTTCCACCGAACCATCCGAACCAGGTAGCGCAGGTACTTCCACCGAACCATCCG |
| | AACCTGGCAGCGCAGGTAGCGAACCGGCAACCTCTGGTACTGAACCATCAGGTAGCG |
| | GCGCATCCGAGCCTACCTCTACTGAACCAGGTAGCGAACCGGCTACCTCCGGTACTGA |
| | GCCATCAGGTAGCGAACCGGCAACTTCCGGTACTGAACCATCAGGTAGCGAACCGGC |
| | AACTTCCGGCACTGAACCATCAGGTAGCGGTGCATCTGAGCCGACCTCTACTGAACCA |
| | GGTACTTCTACTGAACCATCTGAGCCGGGCAGCGCAGGTAGCGAACCAGCTACTTCTG |
| | GCACTGAACCATCAGGTACTTCTACTGAACCATCCGAACCAGGTAGCGCAGGTAGCGA |
| | ACCTGCTACCTCTGGTACTGAGCCATCAGGTAGCGAACCGGCTACCTCTGGTACTGAA |
| | CCATCAGGTACTTCTACCGAACCATCCGAGCCTGGTAGCGCAGGTACTTCTACCGAAC |
| | CATCCGAGCCAGGCAGCGCAGGTAGCGAACCGGCAACCTCTGGCACTGAGCCATCAG |
| | GTAGCGAACCAGCAACTTCTGGTACTGAACCATCAGGTACTAGCGAGCCATCTACTTC |
| | CGAACCAGGTGCAGGTAGCGGCGCATCCGAACCTACTTCCACTGAACCAGGTACTAGC |
| | GAGCCATCCACCTCTGAACCAGGTGCAGGTAGCGAACCGGCAACTTCCGGCACTGAA |
| | CCATCAGGTAGCGAACCGGCTACCTCTGGTACTGAACCATCAGGTACTTCTACCGAAC |
| | CATCCGAGCCTGGTAGCGCAGGTACTTCTACCGAACCATCCGAGCCAGGCAGCGCAG |
| | GTAGCGGTGCATCCGAGCCGACCTCTACTGAACCAGGTAGCGAACCAGCAACTTCTGG |
| | CACTGAGCCATCAGGTAGCGAACCAGCTACCTCTGGTACTGAACCATCAGGTAGCGAA |
| | CCGGCTACTTCCGGCACTGAACCATCAGGTAGCGAACCAGCAACCTCCGGTACTGAAC |
| | CATCAGGTACTTCCACTGAACCATCCGAACCGGGTAGCGCAGGTAGCGAACCGGCAA |
| | CTTCCGGCACTGAACCATCAGGTAGCGGTGCATCTGAGCCGACCTCTACTGAACCAGG |
| | TACTTCTACTGAACCATCTGAGCCGGGCAGCGCAGGTAGCGAACCTGCAACCTCCGGC |
| | ACTGAGCCATCAGGTAGCGGCGCATCTGAACCAACCTCTACTGAACCAGGTACTTCCA |
| | CCGAACCATCTGAGCCAGGCAGCGCAGGTAGCGGCGCATCTGAACCAACCTCTACTG |
| | AACCAGGTAGCGAACCAGCAACTTCTGGTACTGAACCATCAGGTAGCGGCGCATCTG |
| | AGCCTACTTCCACTGAACCAGGTAGCGAACCGGCAACTTCCGGCACTGAACCATCAGG |
| | TAGCGGTGCATCTGAGCCGACCTCTACTGAACCAGGTACTTCTACTGAACCATCTGAG |
| | CCGGGCAGCGCAGGTAGCGAACCGGCAACTTCCGGCACTGAACCATCAGGTAGCGGT |
| | GCATCTGAGCCGACCTCTACTGAACCAGGTACTTCTACTGAACCATCTGAGCCGGGCA |
| | GCGCAGGTAGCGAACCAGCTACTTCTGGCACTGAACCATCAGGTACTTCTACTGAACC |
| | ATCCGAACCAGGTAGCGCAGGTAGCGAACCTGCTACCTCTGGTACTGAGCCATCAGGT |
| | ACTTCTACTGAACCATCCGAGCCGGGTAGCGCAGGTACTTCCACTGAACCATCTGAAC |
| | CTGGTAGCGCAGGTACTTCCACTGAACCATCCGAACCAGGTAGCGCAGGTACTTCTAC |
| | TGAACCATCCGAGCCGGGTAGCGCAGGTACTTCCACTGAACCATCTGAACCTGGTAGC |
| | GCAGGTACTTCCACTGAACCATCCGAACCAGGTAGCGCAGGTACTAGCGAACCATCCA |
| | CCTCCGAACCAGGCGCAGGTAGCGGTGCATCTGAACCGACTTCTACTGAACCAGGTAC |
| | TTCCACTGAACCATCTGAGCCAGGTAGCGCAGGTACTTCCACCGAACCATCCGAACCA |
| | GGTAGCGCAGGTACTTCCACCGAACCATCCGAACCTGGCAGCGCAGGTAGCGAACCG |
| | GCAACCTCTGGTACTGAACCATCAGGTAGCGGTGCATCCGAGCCGACCTCTACTGAAC |
| | CAGGTAGCGAACCAGCAACTTCTGGCACTGAGCCATCAGGTAGCGAACCAGCTACCTC |
| | TGGTACTGAACCATCAGGTAGCGAACCGGCAACCTCTGGCACTGAGCCATCAGGTAGC |
| | GAACCAGCAACTTCTGGTACTGAACCATCAGGTACTAGCGAGCCATCTACTTCCGAAC |
| | CAGGTGCAGGTAGCGAACCTGCAACCTCCGGCACTGAGCCATCAGGTAGCGGCGCAT |
| | CTGAACCAACCTCTACTGAACCAGGTACTTCCACCGAACCATCTGAGCCAGGCAGCGC |
| | AGGTAGCGAACCTGCAACCTCCGGCACTGAGCCATCAGGTAGCGGCGCATCTGAACC |
| | AACCTCTACTGAACCAGGTACTTCCACCGAACCATCTGAGCCAGGCAGCGCA |
| BD864 | GGTAGCGAAACTGCTACTTCCGGCTCTGAGACTGCAGGTACTAGTGAATCCGCAACTA |
| | GCGAATCTGGCGCAGGTAGCACTGCAGGCTCTGAGACTTCCACTGAAGCAGGTACTAG |
| | CGAGTCCGCAACCAGCGAATCCGGCGCAGGTAGCGAAACTGCTACCTCTGGCTCCGA |
| | GACTGCAGGTAGCGAAACTGCAACCTCTGGCTCTGAAACTGCAGGTACTTCCACTGAA |
| | GCAAGTGAAGGCTCCGCATCAGGTACTTCCACCGAAGCAAGCGAAGGCTCCGCATCA |
| | GGTACTAGTGAGTCCGCAACTAGCGAATCCGGTGCAGGTAGCGAAACCGCTACCTCTG |
| | GTTCCGAAACTGCAGGTACTTCTACCGAGGCTAGCGAAGGTTCTGCATCAGGTAGCAC |
| | TGCTGGTTCCGAGACTTCTACTGAAGCAGGTACTAGCGAATCTGCTACTAGCGAATCC |
| | GGCGCAGGTACTAGCGAATCCGCTACCAGCGAATCCGGCGCAGGTAGCGAAACTGCA |
| | ACCTCTGGTTCCGAGACTGCAGGTACTAGCGAGTCCGCTACTAGCGAATCTGGCGCAG |
| | GTACTTCCACTGAAGCTAGTGAAGGTTCTGCATCAGGTAGCGAAACTGCTACTTCTGG |
| | TTCCGAAACTGCAGGTAGCGAAACCGCTACCTCTGGTTCCGAAACTGCAGGTACTTCT |
| | ACCGAGGCTAGCGAAGGTTCTGCATCAGGTAGCACTGCTGGTTCCGAGACTTCTACTG |
| | AAGCAGGTACTAGCGAGTCCGCTACTAGCGAATCTGGCGCAGGTACTTCCACTGAAGC |
| | TAGTGAAGGTTCTGCATCAGGTAGCGAAACTGCTACTTCTGGTTCCGAAACTGCAGGT |
| | AGCACTGCTGGCTCCGAGACTTCTACCGAAGCAGGTAGCACTGCAGGTTCCGAAACTT |
| | CCACTGAAGCAGGTAGCGAAACTGCTACCTCTGGCTCTGAGACTGCAGGTACTAGCGA |
| | ATCTGCTACTAGCGAATCCGGCGCAGGTACTAGCGAATCCGCTACCAGCGAATCCGGC |
| | GCAGGTAGCGAAACTGCAACCTCTGGTTCCGAGACTGCAGGTACTAGCGAATCTGCTA |
| | CTAGCGAATCCGGCGCAGGTACTAGCGAATCCGCTACCAGCGAATCCGGCGCAGGTA |
| | GCGAAACTGCAACCTCTGGTTCCGAGACTGCAGGTAGCGAAACCGCTACCTCTGGTTC |
| | CGAAACTGCAGGTACTTCTACCGAGGCTAGCGAAGGTTCTGCATCAGGTAGCACTGCT |
| | GGTTCCGAGACTTCTACTGAAGCAGGTAGCGAAACTGCTACTTCCGGCTCTGAGACTG |
| | CAGGTACTAGTGAATCCGCAACTAGCGAATCTGGCGCAGGTAGCACTGCAGGCTCTGA |
| | GACTTCCACTGAAGCAGGTAGCACTGCTGGTTCCGAAACCTCTACCGAAGCAGGTAGC |
| | ACTGCAGGTTCTGAAACCTCCACTGAAGCAGGTACTTCCACTGAGGCTAGTGAAGGCT |
| | CTGCATCAGGTAGCACTGCTGGTTCCGAAACCTCTACCGAAGCAGGTAGCACTGCAGG |
| | TTCTGAAACCTCCACTGAAGCAGGTACTTCCACTGAGGCTAGTGAAGGCTCTGCATCA |
| | GGTAGCACTGCAGGTTCTGAGACTTCCACCGAAGCAGGTAGCGAAACTGCTACTTCTG |
| | GTTCCGAAACTGCAGGTACTTCCACTGAAGCTAGTGAAGGTTCCGCATCAGGTACTAG |
| | TGAGTCCGCAACCAGCGAATCCGGCGCAGGTAGCGAAACCGCAACCTCCGGTTCTGA |
| | AACTGCAGGTACTAGCGAATCCGCAACCAGCGAATCTGGCGCAGGTACTAGTGAGTC |
| | CGCAACCAGCGAATCCGGCGCAGGTAGCGAAACCGCAACCTCCGGTTCTGAAACTGC |
| | AGGTACTAGCGAATCCGCAACCAGCGAATCTGGCGCAGGTAGCGAAACTGCTACTTCC |
| | GGCTCTGAGACTGCAGGTACTTCCACCGAAGCAAGCGAAGGTTCCGCATCAGGTACTT |
| | CCACCGAGGCTAGTGAAGGCTCTGCATCAGGTAGCACTGCTGGCTCCGAGACTTCTAC |
| | CGAAGCAGGTAGCACTGCAGGTTCCGAAACTTCCACTGAAGCAGGTAGCGAAACTGC |
| | TACCTCTGGCTCTGAGACTGCAGGTACTAGCGAATCTGCTACTAGCGAATCCGGCGCA |
| | GGTACTAGCGAATCCGCTACCAGCGAATCCGGCGCAGGTAGCGAAACTGCAACCTCT |
| | GGTTCCGAGACTGCAGGTAGCGAAACTGCTACTTCCGGCTCCGAGACTGCAGGTAGCG |
| | AAACTGCTACTTCTGGCTCCGAAACTGCAGGTACTTCTACTGAGGCTAGTGAAGGTTC |
| | CGCATCAGGTACTAGCGAGTCCGCAACCAGCGAATCCGGCGCAGGTAGCGAAACTGC |
| | TACCTCTGGCTCCGAGACTGCAGGTAGCGAAACTGCAACCTCTGGCTCTGAAACTGCA |
| | GGTACTAGCGAATCTGCTACTAGCGAATCCGGCGCAGGTACTAGCGAATCCGCTACCA |
| | GCGAATCCGGCGCAGGTAGCGAAACTGCAACCTCTGGTTCCGAGACTGCA |

*These and other exemplary sequences embody the desired features disclosed herein, including without limitation, substantially non-repetitiveness, low immunogenicity, unstructured conformation, conformational flexibility, enhanced aqueous solubility, high degree of protease resistance, low binding to mammalian receptors, a defined degree of charge, and increased hydrodynamic (or Stokes) radii.

[0475] One may clone the library of XTEN-encoding genes into one or more expression vectors known in the art. To facilitate the identification of well-expressing library members, one can construct the library as fusion to a reporter protein. Non-limiting examples of suitable reporter genes are green fluorescent protein, luciferase, alkaline phosphatase, and beta-galactosidase. By screening, one can identify short XTEN sequences that can be expressed in high concentration in the host organism of choice. Subsequently, one can generate a library of random XTEN dimers and repeat the screen for high level of expression. Subsequently, one can screen the resulting constructs for a number of properties such as level of expression, protease stability, or binding to antiserum.

[0476] One aspect of the invention is to provide polynucleotide sequences encoding the components of the fusion protein wherein the creation of the sequence has undergone codon optimization. Of particular interest is codon optimization with the goal of improving expression of the polypeptide compositions and to improve the genetic stability of the encoding gene in the production hosts. For example, codon optimization is of particular importance for XTEN sequences that are rich in glycine or that have very repetitive amino acid sequences. Codon optimization is performed using computer programs (Gustafsson, C., et al. (2004) Trends Biotechnol, 22: 346-53), some of which minimize ribosomal pausing (Coda Genomics Inc.). In one embodiment, one can perform codon optimization by constructing codon libraries where all members of the library encode the same amino acid sequence but where codon usage is varied. Such libraries can be screened for highly expressing and genetically stable members that are particularly suitable for the large-scale production of XTEN-containing products. When designing XTEN sequences one can consider a number of properties. One can minimize the repetitiveness in the encoding DNA sequences. In addition, one can avoid or minimize the use of codons that are rarely used by the production host (e.g. the AGG and AGA arginine codons and one leucine codon in E. coli). In the case of E. coli, two glycine codons, GGA and GGG, are rarely used in highly expressed proteins. Thus codon optimization of the gene encoding XTEN sequences can be very desirable. DNA sequences that have a high level of glycine tend to have a high GC content that can lead to instability or low expression levels. Thus, when possible, it is preferred to choose codons such that the GC-content of XTEN-encoding sequence is suitable for the production organism that will be used to manufacture the XTEN.

[0477] Optionally, the full-length XTEN-encoding gene comprises one or more sequencing islands. In this context, sequencing islands are short-stretch sequences that are distinct from the XTEN library construct sequences and that include a restriction site not present or expected to be present in the full-length XTEN-encoding gene. In one embodiment, a sequencing island is the sequence 5′-AGGTGCAAGCGCAAGCGGCGCGCCAAGCACGGGAGGT-3′. In another embodiment, a sequencing island is the sequence 5′-AGGTCCAGAACCAACGGGGCCGGCCCCAAGCGGAGGT-3′.

[0478] In one embodiment, polynucleotide libraries are constructed using the disclosed methods wherein all members of the library encode the same amino acid sequence but where codon usage for the respective amino acids in the sequence is varied. Such libraries can be screened for highly expressing and genetically stable members that are particularly suitable for the large-scale production of XTEN-containing products.

[0479] Optionally, one can sequence clones in the library to eliminate isolates that contain undesirable sequences. The initial library of short XTEN sequences allows some variation in amino acid sequence. For instance one can randomize some codons such that a number of hydrophilic amino acids can occur in a particular position. During the process of iterative multimerization one can screen the resulting library members for other characteristics like solubility or protease resistance in addition to a screen for high-level expression.

[0480] Once the gene that encodes the XTEN of desired length and properties is selected, it is genetically fused at the desired location to the nucleotides encoding the FVIII gene(s) by cloning it into the construct adjacent and in frame with the gene coding for CF, or alternatively between nucleotides encoding adjacent domains of the CF, or alternatively within a sequence encoding a given FVIII domain, or alternatively in frame with nucleotides encoding a spacer/cleavage sequence linked to a terminal XTEN. The invention provides various permutations of the foregoing, depending on the CFXTEN to be encoded. For example, a gene encoding a CFXTEN fusion protein comprising a FVIII and two XTEN, such as embodied by formula VI, as depicted above, the gene would have polynucleotides encoding CF, encoding two XTEN, which can be identical or different in composition and sequence length. In one non-limiting embodiment of the foregoing, the FVIII polynucleotides would encode coagulation factor and the polynucleotides encoding the C-terminus XTEN would encode AE864 and the polynucleotides encoding an internal XTEN adjacent to the C-terminus of the A2 domain would encode AE144. The step of cloning the FVIII genes into the XTEN construct can occur through a ligation or multimerization step, as shown in FIG. 12. The constructs encoding CFXTEN fusion proteins can be designed in different configurations of the components XTEN, CF, and spacer sequences, such as the configurations of formulae I-VIII. In one embodiment, the construct comprises polynucleotide sequences complementary to, or those that encode a monomeric polypeptide of components in the following order (5′ to 3′) FVIII and XTEN. In another embodiment, the construct comprises polynucleotide sequences complementary to, or those that encode a monomeric polypeptide of components in the following order (5′ to 3′) CF, spacer sequence, and XTEN. The spacer polynucleotides can optionally comprise sequences encoding cleavage sequences. As will be apparent to those of skill in the art, other permutations or multimers of the foregoing are possible.

[0481] The invention also encompasses polynucleotides comprising XTEN-encoding polynucleotide variants that have a high percentage of sequence identity compared to (a) a polynucleotide sequence from Table 8, or (b) sequences that are complementary to the polynucleotides of (a). A polynucleotide with a high percentage of sequence identity is one that has at least about an 80% nucleic acid sequence identity, alternatively at least about 81%, alternatively at least about 82%, alternatively at least about 83%, alternatively at least about 84%, alternatively at least about 85%, alternatively at least about 86%, alternatively at least about 87%, alternatively at least about 88%, alternatively at least about 89%, alternatively at least about 90%, alternatively at least about 91%, alternatively at least about 92%, alternatively at least about 93%, alternatively at least about 94%, alternatively at least about 95%, alternatively at least about 96%, alternatively at least about 97%, alternatively at least about 98%, and alternatively at least about 99% nucleic acid sequence identity compared to (a) or (b) of the foregoing, or that can hybridize with the target polynucleotide or its complement under stringent conditions.

[0482] Homology, sequence similarity or sequence identity of nucleotide or amino acid sequences may also be determined conventionally by using known software or computer programs such as the BestFit or Gap pairwise comparison programs (GCG Wisconsin Package, Genetics Computer Group, 575 Science Drive, Madison, Wis. 53711). BestFit uses the local homology algorithm of Smith and Waterman (Advances in Applied Mathematics. 1981. 2: 482-489), to find the best segment of identity or similarity between two sequences. Gap performs global alignments: all of one sequence with all of another similar sequence using the method of Needleman and Wunsch, (Journal of Molecular Biology. 1970. 48:443-453). When using a sequence alignment program such as BestFit, to determine the degree of sequence homology, similarity or identity, the default setting may be used, or an appropriate scoring matrix may be selected to optimize identity, similarity or homology scores.

[0483] Nucleic acid sequences that are “complementary” are those that are capable of base-pairing according to the standard Watson-Crick complementarity rules. As used herein, the term “complementary sequences” means nucleic acid sequences that are substantially complementary, as may be assessed by the same nucleotide comparison set forth above, or as defined as being capable of hybridizing to the polynucleotides that encode the CFXTEN sequences under stringent conditions, such as those described herein.

[0484] The resulting polynucleotides encoding the CFXTEN chimeric fusion proteins can then be individually cloned into an expression vector. The nucleic acid sequence is inserted into the vector by a variety of procedures. In general, DNA is inserted into an appropriate restriction endonuclease site(s) using techniques known in the art. Vector components generally include, but are not limited to, one or more of a signal sequence, an origin of replication, one or more marker genes, an enhancer element, a promoter, and a transcription termination sequence. Construction of suitable vectors containing one or more of these components employs standard ligation techniques which are known to the skilled artisan. Such techniques are well known in the art and well described in the scientific and patent literature.

[0485] Various vectors are publicly available. The vector may, for example, be in the form of a plasmid, cosmid, viral particle, or phage that may conveniently be subjected to recombinant DNA procedures, and the choice of vector will often depend on the host cell into which it is to be introduced. Thus, the vector may be an autonomously replicating vector, i.e., a vector, which exists as an extrachromosomal entity, the replication of which is independent of chromosomal replication, e.g., a plasmid. Alternatively, the vector may be one which, when introduced into a host cell, is integrated into the host cell genome and replicated together with the chromosome(s) into which it has been integrated. Representative plasmids are illustrated in FIG. 15, with encoding regions for different configurations of FVIII and XTEN components portrayed.

[0486] The invention provides for the use of plasmid vectors containing replication and control sequences that are compatible with and recognized by the host cell, and are operably linked to the CFXTEN gene for controlled expression of the CFXTEN fusion proteins. The vector ordinarily carries a replication site, as well as sequences that encode proteins that are capable of providing phenotypic selection in transformed cells. Such vector sequences are well known for a variety of bacteria, yeast, and viruses. Useful expression vectors that can be used include, for example, segments of chromosomal, non-chromosomal and synthetic DNA sequences. “Expression vector” refers to a DNA construct containing a DNA sequence that is operably linked to a suitable control sequence capable of effecting the expression of the DNA encoding the fusion protein in a suitable host. The requirements are that the vectors are replicable and viable in the host cell of choice. Low- or high-copy number vectors may be used as desired.

[0487] Other suitable vectors include, but are not limited to, derivatives of SV40 and pcDNA and known bacterial plasmids such as col EI, pCR1, pBR322, pMal-C2, pET, pGEX as described by Smith, et al., Gene 57:31-40 (1988), pMB9 and derivatives thereof, plasmids such as RP4, phage DNAs such as the numerous derivatives of phage I such as NM98 9, as well as other phage DNA such as M13 and filamentous single stranded phage DNA; yeast plasmids such as the 2 micron plasmid or derivatives of the 2 m plasmid, as well as centomeric and integrative yeast shuttle vectors; vectors useful in eukaryotic cells such as vectors useful in insect or mammalian cells; vectors derived from combinations of plasmids and phage DNAs, such as plasmids that have been modified to employ phage DNA or the expression control sequences; and the like. Yeast expression systems that can also be used in the present invention include, but are not limited to, the non-fusion pYES2 vector (Invitrogen), the fusion pYESHisA, B, C (Invitrogen), pRS vectors and the like.

[0488] The control sequences of the vector include a promoter to effect transcription, an optional operator sequence to control such transcription, a sequence encoding suitable mRNA ribosome binding sites, and sequences that control termination of transcription and translation. The promoter may be any DNA sequence, which shows transcriptional activity in the host cell of choice and may be derived from genes encoding proteins either homologous or heterologous to the host cell.

[0489] Examples of suitable promoters for directing the transcription of the DNA encoding the FVIII polypeptide variant in mammalian cells are the SV40 promoter (Subramani et al., Mol. Cell. Biol. 1 (1981), 854-864), the MT-1 (metallothionein gene) promoter (Palmiter et al., Science 222 (1983), 809-814), the CMV promoter (Boshart et al., Cell 41:521-530, 1985) or the adenovirus 2 major late promoter (Kaufman and Sharp, Mol. Cell. Biol, 2:1304-1319, 1982). The vector may also carry sequences such as UCOE (ubiquitous chromatin opening elements).

[0490] Examples of suitable promoters for use in filamentous fungus host cells are, for instance, the ADH3 promoter or the tpiA promoter. Examples of other useful promoters are those derived from the gene encoding A. oryzae TAKA amylase, Rhizomucor miehei aspartic proteinase, A. niger neutral α-amylase, A. niger acid stable α-amylase, A. niger or A. awamoriglucoamylase (gluA), Rhizomucor miehei lipase, A. oryzae alkaline protease, A. oryzae triose phosphate isomerase or A. nidulans acetamidase. Preferred are the TAKA-amylase and gluA promoters.

[0491] Promoters suitable for use in expression vectors with prokaryotic hosts include the β-lactamase and lactose promoter systems [Chang et al., Nature, 275:615 (1978); Goeddel et al., Nature, 281:544 (1979)], alkaline phosphatase, a tryptophan (trp) promoter system [Goeddel, Nucleic Acids Res., 8:4057 (1980); EP 36,776], and hybrid promoters such as the tac promoter [deBoer et al., Proc. Natl. Acad. Sci. USA, 80:21-25 (1983)], all is operably linked to the DNA encoding CFXTEN polypeptides. Promoters for use in bacterial systems can also contain a Shine-Dalgarno (S.D.) sequence, operably linked to the DNA encoding CFXTEN polypeptides.

[0492] The invention contemplates use of other expression systems including, for example, a baculovirus expression system with both non-fusion transfer vectors, such as, but not limited to pVL941 Summers, et al., Virology 84:390-402 (1978)), pVL1393 (Invitrogen), pVL1392 (Summers, et al., Virology 84:390-402 (1978) and Invitrogen) and pBlueBacIII (Invitrogen), and fusion transfer vectors such as, but not limited to, pAc7 00 (Summers, et al., Virology 84:390-402 (1978)), pAc701 and pAc70-2 (same as pAc700, with different reading frames), pAc360 Invitrogen) and pBlueBacHisA, B, C (Invitrogen) can be used.

[0493] Examples of suitable promoters for directing the transcription of the DNA encoding the FVIII polypeptide variant in mammalian cells are the CMV promoter (Boshart et al., Cell 41:521-530, 1985), the SV40 promoter (Subramani et al., Mol. Cell. Biol. 1 (1981), 854-864), the MT-1 (metallothionein gene) promoter (Palmiter et al., Science 222 (1983), 809-814), the adenovirus 2 major late promoter (Kaufman and Sharp, Mol. Cell. Biol, 2:1304-1319, 1982). The vector may also carry sequences such as UCOE (ubiquitous chromatin opening elements).

[0494] Examples of suitable promoters for use in filamentous fungus host cells are, for instance, the ADH3 promoter or the tpiA promoter.

[0495] The DNA sequences encoding the CFXTEN may also, if necessary, be operably connected to a suitable terminator, such as the hGH terminator (Palmiter et al., Science 222, 1983, pp. 809-814) or the TPI1 terminators (Alber and Kawasaki, J. Mol. Appl. Gen. 1, 1982, pp. 419-434) or ADH3 (McKnight et al., The EMBO J. 4, 1985, pp. 2093-2099). Expression vectors may also contain a set of RNA splice sites located downstream from the promoter and upstream from the insertion site for the CFXTEN sequence itself, including splice sites obtained from adenovirus. Also contained in the expression vectors is a polyadenylation signal located downstream of the insertion site. Particularly preferred polyadenylation signals include the early or late polyadenylation signal from SV40 (Kaufman and Sharp, ibid.), the polyadenylation signal from the adenovirus 5 Elb region, the hGH terminator (DeNoto et al. Nucl. Acids Res. 9:3719-3730, 1981). The expression vectors may also include a noncoding viral leader sequence, such as the adenovirus 2 tripartite leader, located between the promoter and the RNA splice sites; and enhancer sequences, such as the SV40 enhancer.

[0496] To direct the CFXTEN of the present invention into the secretory pathway of the host cells, a secretory signal sequence (a.k.a., a leader sequence, a prepro sequence, or a pre sequence) may be included in the recombinant vector. The secretory signal sequence is operably linked to the DNA sequences encoding the CFXTEN, usually positioned 5′ to the DNA sequence encoding the CFXTEN fusion protein. The secretory signal sequence may be that, normally associated with the protein or may be from a gene encoding another secreted protein. Non-limiting examples include OmpA, PhoA, and DsbA for E. coli expression, ppL-alpha, DEX4, invertase signal peptide, acid phosphatase signal peptide, CPY, or INU1 for yeast expression, and IL2L, SV40, IgG kappa and IgG lambda for mammalian expression. Signal sequences are typically proteolytically removed from the protein during the translocation and secretion process, generating a defined N-terminus. Methods are disclosed in Arnau, et al., Protein Expression and Purification 48: 1-13 (2006).

[0497] The procedures used to ligate the DNA sequences coding for the CFXTEN, the promoter and optionally the terminator and/or secretory signal sequence, respectively, and to insert them into suitable vectors containing the information necessary for replication, are well known to persons skilled in the art (cf., for instance, Sambrook, J. et al., “Molecular Cloning: A Laboratory Manual,” 3^{rd} edition, Cold Spring Harbor Laboratory Press, 2001).

[0498] In other cases, the invention provides constructs and methods of making constructs comprising an polynucleotide sequence optimized for expression that encodes at least about 20 to about 60 amino acids with XTEN characteristics that can be included at the N-terminus of an XTEN carrier encoding sequence (in other words, the polynucleotides encoding the 20-60 encoded optimized amino acids are linked in frame to polynucleotides encoding an XTEN component that is N-terminal to CF) to promote the initiation of translation to allow for expression of XTEN fusions at the N-terminus of proteins without the presence of a helper domain. In an advantage of the foregoing, the sequence does not require subsequent cleavage, thereby reducing the number of steps to manufacture XTEN-containing compositions. As described in more detail in the Examples, the optimized N-terminal sequence has attributes of an unstructured protein, but may include nucleotide bases encoding amino acids selected for their ability to promote initiation of translation and enhanced expression. In one embodiment of the foregoing, the optimized polynucleotide encodes an XTEN sequence with at least about 90% sequence identity compared to AE912. In another embodiment of the foregoing, the optimized polynucleotide encodes an XTEN sequence with at least about 90% sequence identity compared to AM923. In another embodiment of the foregoing, the optimized polynucleotide encodes an XTEN sequence with at least about 90% sequence identity compared to AE48. In another embodiment of the foregoing, the optimized polynucleotide encodes an XTEN sequence with at least about 90% sequence identity compared to AM48. In one embodiment, the optimized polynucleotide NTS comprises a sequence that exhibits at least about 80%, at least about 85%, at least about 90%, at least about 91%, at least about 92%, at least about 93%, at least about 94%, at least about 95%, at least about 96%, at least about 97%, at least about 98%, or at least about 99%, sequence identity compared to a sequence or its complement selected from

AE 48: 5′-
ATGGCTGAACCTGCTGGCTCTCCAACCTCCACTGAGGAAGGTACCCCGGG
TAGCGGTACTGCTTCTTCCTCTCCAGGTAGCTCTACCCCTTCTGGTGCAA
CCGGCTCTCCAGGTGCTTCTCCGGGCACCAGCTCTACCGGTTCTCCA-3′
and
AM 48: 5′-
ATGGCTGAACCTGCTGGCTCTCCAACCTCCACTGAGGAAGGTGCATCCCC
GGGCACCAGCTCTACCGGTTCTCCAGGTAGCTCTACCCCGTCTGGTGCTA
CCGGCTCTCCAGGTAGCTCTACCCCGTCTGGTGCTACTGGCTCTCCA-3′

[0499] In this manner, a chimeric DNA molecule coding for a monomeric CFXTEN fusion protein is generated within the construct. Optionally, this chimeric DNA molecule may be transferred or cloned into another construct that is a more appropriate expression vector. At this point, a host cell capable of expressing the chimeric DNA molecule can be transformed with the chimeric DNA molecule.

[0500] Non-limiting examples of mammalian cell lines for use in the present invention are the COS-1 (ATCC CRL 1650), COS-7 (ATCC CRL 1651), BHK-21 (ATCC CCL 10)) and BHK-293 (ATCC CRL 1573; Graham et al., J. Gen. Virol. 36:59-72, 1977), BHK-570 cells (ATCC CRL 10314), CHO-K1 (ATCC CCL 61), CHO-S (Invitrogen 11619-012), and 293-F (Invitrogen R790-7), and the parental and derivative cell lines known in the art useful for expression of FVIII. A tk-ts13 BHK cell line is also available from the ATCC under accession number CRL 1632. In addition, a number of other cell lines may be used within the present invention, including Rat Hep I (Rat hepatoma; ATCC CRL 1600), Rat Hep II (Rat hepatoma; ATCC CRL 1548), TCMK (ATCC CCL 139), Human lung (ATCC HB 8065), NCTC 1469 (ATCC CCL 9.1), CHO (ATCC CCL 61) and DUKX cells (Urlaub and Chasin, Proc. Natl. Acad. Sci. USA 77:4216-4220, 1980).

[0501] Examples of suitable yeasts cells include cells of Saccharomyces spp. or Schizosaccharomyces spp., in particular strains of Saccharomyces cerevisiae or Saccharomyces kluyveri. Methods for transforming yeast cells with heterologous DNA and producing heterologous polypeptides there from are described, e.g. in U.S. Pat. No. 4,599,311, U.S. Pat. No. 4,931,373, U.S. Pat. Nos. 4,870,008, 5,037,743, and U.S. Pat. No. 4,845,075, all of which are hereby incorporated by reference. Transformed cells are selected by a phenotype determined by a selectable marker, commonly drug resistance or the ability to grow in the absence of a particular nutrient, e.g. leucine. A preferred vector for use in yeast is the POT1 vector disclosed in U.S. Pat. No. 4,931,373. The DNA sequences encoding the CFXTEN may be preceded by a signal sequence and optionally a leader sequence, e.g. as described above. Further examples of suitable yeast cells are strains of Kluyveromyces, such as K. lactis, Hansenula, e.g. H. polymorpha, or Pichia, e.g. P. pastoris (cf. Gleeson et al., J. Gen. Microbiol. 132, 1986, pp. 3459-3465; U.S. Pat. No. 4,882,279). Examples of other fungal cells are cells of filamentous fungi, e.g. Aspergillus spp., Neurospora spp., Fusarium spp. or Trichoderma spp., in particular strains of A. oryzae, A. nidulans or A. niger. The use of Aspergillus spp. for the expression of proteins is described in, e.g., EP 272 277, EP 238 023, EP 184 438 The transformation of F. oxysporum may, for instance, be carried out as described by Malardier et al., 1989, Gene 78: 147-156. The transformation of Trichoderma spp. may be performed for instance as described in EP 244 234.

[0502] Other suitable cells that can be used in the present invention include, but are not limited to, prokaryotic host cells strains such as Escherichia coli, (e.g., strain DH5-α), Bacillus subtilis, Salmonella typhimurium, or strains of the genera of Pseudomonas, Streptomyces and Staphylococcus. Non-limiting examples of suitable prokaryotes include those from the genera: Actinoplanes; Archaeoglobus; Bdellovibrio; Borrelia; Chloroflexus; Enterococcus; Escherichia; Lactobacillus; Listeria; Oceanobacillus; Paracoccus; Pseudomonas; Staphylococcus; Streptococcus; Streptomyces; Thermoplasma; and Vibrio.

[0503] Methods of transfecting mammalian cells and expressing DNA sequences introduced in the cells are described in e.g., Kaufman and Sharp, J. Mol. Biol. 159 (1982), 601-621; Southern and Berg, J. Mol. Appl. Genet. 1 (1982), 327-341; Loyter et al., Proc. Natl. Acad. Sci. USA 79 (1982), 422-426; Wigler et al., Cell 14 (1978), 725; Corsaro and Pearson, Somatic Cell Genetics 7 (1981), 603, Graham and van der Eb, Virology 52 (1973), 456; and Neumann et al., EMBO J. 1 (1982), 841-845.

[0504] Cloned DNA sequences are introduced into cultured mammalian cells by, for example, calcium phosphate-mediated transfection (Wigler et al., Cell 14:725-732, 1978; Corsaro and Pearson, Somatic Cell Genetics 7:603-616, 1981; Graham and Van der Eb, Virology 52d:456-467, 1973), transfection with many commercially available reagents such as FuGENEG Roche Diagnostics, Mannheim, Germany) or lipofectamine (Invitrogen) or by electroporation (Neumann et al., EMBO J. 1:841-845, 1982). To identify and select cells that express the exogenous DNA, a gene that confers a selectable phenotype (a selectable marker) is generally introduced into cells along with the gene or cDNA of interest. Preferred selectable markers include genes that confer resistance to drugs such as neomycin, hygromycin, puromycin, zeocin, and methotrexate. The selectable marker may be an amplifiable selectable marker. A preferred amplifiable selectable marker is a dihydrofolate reductase (DHFR) sequence. Further examples of selectable markers are well known to one of skill in the art and include reporters such as enhanced green fluorescent protein (EGFP), beta-galactosidase (β-gal) or chloramphenicol acetyltransferase (CAT). Selectable markers are reviewed by Thilly (Mammalian Cell Technology, Butterworth Publishers, Stoneham, Mass., incorporated herein by reference). The person skilled in the art will easily be able to choose suitable selectable markers. Any known selectable marker may be employed so long as it is capable of being expressed simultaneously with the nucleic acid encoding a gene product.

[0505] Selectable markers may be introduced into the cell on a separate plasmid at the same time as the gene of interest, or they may be introduced on the same plasmid. If, on the same plasmid, the selectable marker and the gene of interest may be under the control of different promoters or the same promoter, the latter arrangement producing a dicistronic message. Constructs of this type are known in the art (for example, Levinson and Simonsen, U.S. Pat. No. 4,713,339). It may also be advantageous to add additional DNA, known as “carrier DNA,” to the mixture that is introduced into the cells.

[0506] After the cells have taken up the DNA, they are grown in an appropriate growth medium, typically 1-2 days, to begin expressing the gene of interest. As used herein the term “appropriate growth medium” means a medium containing nutrients and other components required for the growth of cells and the expression of the CFXTEN of interest. Media generally include a carbon source, a nitrogen source, essential amino acids, essential sugars, vitamins, salts, phospholipids, protein and growth factors. For production of gamma-carboxylated proteins, the medium will contain vitamin K, preferably at a concentration of about 0.1 μg/ml to about 5 μg/ml. Drug selection is then applied to select for the growth of cells that are expressing the selectable marker in a stable fashion. For cells that have been transfected with an amplifiable selectable marker the drug concentration may be increased to select for an increased copy number of the cloned sequences, thereby increasing expression levels. Clones of stably transfected cells are then screened for expression of the FVIII polypeptide variant of interest.

[0507] The transformed or transfected host cell is then cultured in a suitable nutrient medium under conditions permitting expression of the FVIII polypeptide variant after which the resulting peptide may be recovered from the culture. The medium used to culture the cells may be any conventional medium suitable for growing the host cells, such as minimal or complex media containing appropriate supplements. Suitable media are available from commercial suppliers or may be prepared according to published recipes (e.g. in catalogues of the American Type Culture Collection). The culture conditions, such as temperature, pH and the like, are those previously used with the host cell selected for expression, and will be apparent to the ordinarily skilled artisan.

[0508] Gene expression may be measured in a sample directly, for example, by conventional Southern blotting, Northern blotting to quantitate the transcription of mRNA [Thomas, Proc. Natl. Acad. Sci. USA, 77:5201-5205 (1980)], dot blotting (DNA analysis), or in situ hybridization, using an appropriately labeled probe, based on the sequences provided herein. Alternatively, antibodies may be employed that can recognize specific duplexes, including DNA duplexes, RNA duplexes, and DNA-RNA hybrid duplexes or DNA-protein duplexes. The antibodies in turn may be labeled and the assay may be carried out where the duplex is bound to a surface, so that upon the formation of duplex on the surface, the presence of antibody bound to the duplex can be detected.

[0509] Gene expression, alternatively, may be measured by immunological of fluorescent methods, such as immunohistochemical staining of cells or tissue sections and assay of cell culture or body fluids or the detection of selectable markers, to quantitate directly the expression of gene product. Antibodies useful for immunohistochemical staining and/or assay of sample fluids may be either monoclonal or polyclonal, and may be prepared in any mammal. Conveniently, the antibodies may be prepared against a native sequence FVIII polypeptide or against a synthetic peptide based on the DNA sequences provided herein or against exogenous sequence fused to FVIII and encoding a specific antibody epitope. Examples of selectable markers are well known to one of skill in the art and include reporters such as enhanced green fluorescent protein (EGFP), beta-galactosidase (β-gal) or chloramphenicol acetyltransferase (CAT). Expressed CFXTEN polypeptide product(s) may be purified via methods known in the art or by methods disclosed herein. Procedures such as gel filtration, affinity purification (e.g., using an anti-FVIII antibody column), salt fractionation, ion exchange chromatography, size exclusion chromatography, hydroxyapatite adsorption chromatography, hydrophobic interaction chromatography and gel electrophoresis may be used; each tailored to recover and purify the fusion protein produced by the respective host cells. Additional purification may be achieved by conventional chemical purification means, such as high performance liquid chromatography. Some expressed CFXTEN may require refolding during isolation and purification. Methods of purification are described in Robert K. Scopes, Protein Purification: Principles and Practice, Charles R. Castor (ed.), Springer-Verlag 1994, and Sambrook, et al., supra. Multi-step purification separations are also described in Baron, et al., Crit. Rev. Biotechnol. 10:179-90 (1990) and Below, et al., J. Chromatogr. A. 679:67-83 (1994). For therapeutic purposes it is preferred that the CFXTEN fusion proteins of the invention are substantially pure. Thus, in a preferred embodiment of the invention the CFXTEN of the invention is purified to at least about 90 to 95% homogeneity, preferably to at least about 98% homogeneity. Purity may be assessed by, e.g., gel electrophoresis, HPLC, and amino-terminal amino acid sequencing.

### VIII). Pharmaceutical Compositions

[0510] The present invention provides pharmaceutical compositions comprising CFXTEN. In one embodiment, the pharmaceutical composition comprises a CFXTEN fusion protein disclosed herein and at least one pharmaceutically acceptable carrier. CFXTEN polypeptides of the present invention can be formulated according to known methods to prepare pharmaceutically useful compositions, whereby the polypeptide is combined in admixture with a pharmaceutically acceptable carrier vehicle, such as aqueous solutions, buffers, solvents and/or pharmaceutically acceptable suspensions, emulsions, stabilizers or excipients. Examples of non-aqueous solvents include propyl ethylene glycol, polyethylene glycol and vegetable oils. Formulations of the pharmaceutical compositions are prepared for storage by mixing the active CFXTEN ingredient having the desired degree of purity with optional physiologically acceptable carriers, excipients (e.g., sodium chloride, a calcium salt, sucrose, or polysorbate) or stabilizers (e.g., sucrose, trehalose, raffinose, arginine, a calcium salt, glycine or histidine), as described in Remington's Pharmaceutical Sciences 16th edition, Osol, A. Ed. (1980), in the form of lyophilized formulations or aqueous solutions.

[0511] In one embodiment, the pharmaceutical composition may be supplied as a lyophilized powder to be reconstituted prior to administration. In another embodiment, the pharmaceutical composition may be supplied in a liquid form, which can be administered directly to a patient. In another embodiment, the composition is supplied as a liquid in a pre-filled syringe for administration of the composition. In another embodiment, the composition is supplied as a liquid in a pre-filled vial that can be incorporated into a pump.

[0512] The pharmaceutical compositions can be administered by any suitable means or route, including subcutaneously, subcutaneously by infusion pump, intramuscularly, and intravenously. It will be appreciated that the preferred route will vary with the disease and age of the recipient, and the severity of the condition being treated.

[0513] In one embodiment, the CFXTEN pharmaceutical composition in liquid form or after reconstitution (when supplied as a lyophilized powder) comprises coagulation factor VIII with an activity of at least 50 IU/ml, or at least 100 IU/ml, or at least 200 IU/ml, or at least 300 IU/ml, or at least 400 IU/ml, or an activity of at least 500 IU/ml, or an activity of at least 600 IU/ml, which composition is capable of increasing factor VIII activity to at least 1.5% of the normal plasma level in the blood for at least about 12 hours, or at least about 24 hours, or at least about 48 hours, or at least about 72 hours, or at least about 96 hours, or at least about 120 hours after administration of the factor VIII pharmaceutical composition to a subject in need of routine prophylaxis. In another embodiment, the CFXTEN pharmaceutical composition in liquid form or after reconstitution (when supplied as a lyophilized powder) comprises coagulation factor VIII with an activity of at least 50 IU/ml, or at least 100 IU/ml, or at least 200 IU/ml, or at least 300 IU/ml, or at least 400 IU/ml, or at least 500 IU/ml, or an activity of at least 600 IU/ml, which composition is capable of increasing factor VIII activity to at least 2.5% of the normal plasma level in the blood for at least about 12 hours, or at least about 24 hours, or at least about 48 hours, or at least about 72 hours, or at least about 96 hours, or at least about 120 hours after administration to a subject in need of routine prophylaxis. It is specifically contemplated that the pharmaceutical compositions of the foregoing can be formulated to include one or more excipients, buffers or other ingredients known in the art to be compatible with administration by the intravenous route or the subcutaneous route or the intramuscular route. Thus, in the embodiments hereinabove described in this paragraph, the pharmaceutical composition is administered subcutaneously, intramuscularly or intravenously.

[0514] The compositions of the invention may be formulated using a variety of excipients. Suitable excipients include microcrystalline cellulose (e.g. Avicel PH102, Avicel PH101), polymethacrylate, poly(ethyl acrylate, methyl methacrylate, trimethylammonioethyl methacrylate chloride) (such as Eudragit RS-30D), hydroxypropyl methylcellulose (Methocel K100M, Premium CR Methocel K100M, Methocel E5, Opadry®), magnesium stearate, talc, triethyl citrate, aqueous ethylcellulose dispersion (Surelease®), and protamine sulfate. The slow release agent may also comprise a carrier, which can comprise, for example, solvents, dispersion media, coatings, antibacterial and antifungal agents, isotonic and absorption delaying agents. Pharmaceutically acceptable salts can also be used in these slow release agents, for example, mineral salts such as hydrochlorides, hydrobromides, phosphates, or sulfates, as well as the salts of organic acids such as acetates, proprionates, malonates, or benzoates. The composition may also contain liquids, such as water, saline, glycerol, and ethanol, as well as substances such as wetting agents, emulsifying agents, or pH buffering agents. Liposomes may also be used as a carrier.

[0515] In another embodiment, the compositions of the present invention are encapsulated in liposomes, which have demonstrated utility in delivering beneficial active agents in a controlled manner over prolonged periods of time. Liposomes are closed bilayer membranes containing an entrapped aqueous volume. Liposomes may also be unilamellar vesicles possessing a single membrane bilayer or multilamellar vesicles with multiple membrane bilayers, each separated from the next by an aqueous layer. The structure of the resulting membrane bilayer is such that the hydrophobic (non-polar) tails of the lipid are oriented toward the center of the bilayer while the hydrophilic (polar) heads orient towards the aqueous phase. In one embodiment, the liposome may be coated with a flexible water soluble polymer that avoids uptake by the organs of the mononuclear phagocyte system, primarily the liver and spleen. Suitable hydrophilic polymers for surrounding the liposomes include, without limitation, PEG, polyvinylpyrrolidone, polyvinylmethylether, polymethyloxazoline, polyethyloxazoline, polyhydroxypropyloxazoline, polyhydroxypropylmethacrylamide, polymethacrylamide, polydimethylacrylamide, polyhydroxypropylmethacrylate, polyhydroxethylacrylate, hydroxymethylcellulose hydroxyethylcellulose, polyethyleneglycol, polyaspartamide and hydrophilic peptide sequences as described in U.S. Pat. Nos. 6,316,024; 6,126,966; 6,056,973; 6,043,094, the contents of which are incorporated by reference in their entirety.

[0516] Liposomes may be comprised of any lipid or lipid combination known in the art. For example, the vesicle-forming lipids may be naturally-occurring or synthetic lipids, including phospholipids, such as phosphatidylcholine, phosphatidylethanolamine, phosphatidic acid, phosphatidylserine, phasphatidylglycerol, phosphatidylinositol, and sphingomyelin as disclosed in U.S. Pat. Nos. 6,056,973 and 5,874,104. The vesicle-forming lipids may also be glycolipids, cerebrosides, or cationic lipids, such as 1,2-dioleyloxy-3-(trimethylamino) propane (DOTAP); N-[1-(2,3,-ditetradecyloxy)propyl]-N,N-dimethyl-N-hydroxyethylammonium bromide (DMRIE); N-[1 [(2,3,-dioleyloxy)propyl]-N,N-dimethyl-N-hydroxy ethylammonium bromide (DORIE); N-[1-(2,3-dioleyloxy)propyl]-N,N,N-trimethylammonium chloride (DOTMA); 3 [N—(N′,N′-dimethylaminoethane) carbamoyl]cholesterol (DC-Chol); or dimethyldioctadecylammonium (DDAB) also as disclosed in U.S. Pat. No. 6,056,973. Cholesterol may also be present in the proper range to impart stability to the vesicle as disclosed in U.S. Pat. Nos. 5,916,588 and 5,874,104.

[0517] Additional liposomal technologies are described in U.S. Pat. Nos. 6,759,057; 6,406,713; 6,352,716; 6,316,024; 6,294,191; 6,126,966; 6,056,973; 6,043,094; 5,965,156; 5,916,588; 5,874,104; 5,215,680; and 4,684,479, the contents of which are incorporated herein by reference. These describe liposomes and lipid-coated microbubbles, and methods for their manufacture. Thus, one skilled in the art, considering both the disclosure of this invention and the disclosures of these other patents could produce a liposome for the extended release of the polypeptides of the present invention.

[0518] For liquid formulations, a desired property is that the formulation be supplied in a form that can pass through a 25, 28, 30, 31, 32 gauge needle for intravenous, intramuscular, intraarticular, or subcutaneous administration.

[0519] Osmotic pumps may be used as slow release agents in the form of tablets, pills, capsules or implantable devices. Osmotic pumps are well known in the art and readily available to one of ordinary skill in the art from companies experienced in providing osmotic pumps for extended release drug delivery. Examples are ALZA's DUROS™; ALZA's OROS™; Osmotica Pharmaceutical's Osmodex™ system; Shire Laboratories' EnSoTrol™ system; and Alzet™. Patents that describe osmotic pump technology are U.S. Pat. Nos. 6,890,918; 6,838,093; 6,814,979; 6,713,086; 6,534,090; 6,514,532; 6,361,796; 6,352,721; 6,294,201; 6,284,276; 6,110,498; 5,573,776; 4,200,0984; and 4,088,864, the contents of which are incorporated herein by reference. One skilled in the art, considering both the disclosure of this invention and the disclosures of these other patents could produce an osmotic pump for the extended release of the polypeptides of the present invention.

[0520] Syringe pumps may also be used as slow release agents. Such devices are described in U.S. Pat. Nos. 4,976,696; 4,933,185; 5,017,378; 6,309,370; 6,254,573; 4,435,173; 4,398,908; 6,572,585; 5,298,022; 5,176,502; 5,492,534; 5,318,540; and 4,988,337, the contents of which are incorporated herein by reference. One skilled in the art, considering both the disclosure of this invention and the disclosures of these other patents could produce a syringe pump for the extended release of the compositions of the present invention.

### IX). Pharmaceutical Kits

[0521] In another aspect, the invention provides a kit to facilitate the use of the CFXTEN polypeptides. The kit comprises the pharmaceutical composition provided herein, a label identifying the pharmaceutical composition, and an instruction for storage, reconstitution and/or administration of the pharmaceutical compositions to a subject. In some embodiment, the kit comprises, preferably: (a) an amount of a CFXTEN fusion protein composition sufficient to treat a disease, condition or disorder upon administration to a subject in need thereof; and (b) an amount of a pharmaceutically acceptable carrier; together in a formulation ready for injection or for reconstitution with sterile water, buffer, or dextrose; together with a label identifying the CFXTEN drug and storage and handling conditions, and a sheet of the approved indications for the drug, instructions for the reconstitution and/or administration of the CFXTEN drug for the use for the prevention and/or treatment of an approved indication, appropriate dosage and safety information, and information identifying the lot and expiration of the drug. In another embodiment of the foregoing, the kit can comprise a second container that can carry a suitable diluent for the CFXTEN composition, the use of which will provide the user with the appropriate concentration of CFXTEN to be delivered to the subject.

### EXAMPLES

### Example 1

### Construction of XTEN_AD36 Motif Segments

[0522] The following example describes the construction of a collection of codon-optimized genes encoding motif sequences of 36 amino acids. As a first step, a stuffer vector pCW0359 was constructed based on a pET vector and that includes a T7 promoter. pCW0359 encodes a cellulose binding domain (CBD) and a TEV protease recognition site followed by a stuffer sequence that is flanked by BsaI, BbsI, and KpnI sites. The BsaI and BbsI sites were inserted such that they generate compatible overhangs after digestion. The stuffer sequence is followed by a truncated version of the GFP gene and a His tag. The stuffer sequence contains stop codons and thus E. coli cells carrying the stuffer plasmid pCW0359 form non-fluorescent colonies. The stuffer vector pCW0359 was digested with BsaI and KpnI to remove the stuffer segment and the resulting vector fragment was isolated by agarose gel purification. The sequences were designated XTEN_AD36, reflecting the AD family of motifs. Its segments have the amino acid sequence [X]₃ where X is a 12 mer peptide with the sequences: GESPGGSSGSES, GSEGSSGPGESS, GSSESGSSEGGP, or GSGGEPSESGSS. The insert was obtained by annealing the following pairs of phosphorylated synthetic oligonucleotide pairs:

AD1for: AGGTGAATCTCCDGGTGGYTCYAGCGGTTCYGARTC
AD1rev: ACCTGAYTCRGAACCGCTRGARCCACCHGGAGATTC
AD2for: AGGTAGCGAAGGTTCTTCYGGTCCDGGYGARTCYTC
AD2rev: ACCTGARGAYTCRCCHGGACCRGAAGAACCTTCGCT
AD3for: AGGTTCYTCYGAAAGCGGTTCTTCYGARGGYGGTCC
AD3rev: ACCTGGACCRCCYTCRGAAGAACCGCTTTCRGARGA
AD4for: AGGTTCYGGTGGYGAACCDTCYGARTCTGGTAGCTC

[0523] We also annealed the phosphorylated oligonucleotide “3KpnIstopperFor”: AGGTTCGTCTTCACTCGAGGGTAC and the non-phosphorylated oligonucleotide pr_{—}3KpnIstopperRev: CCTCGAGTGAAGACGA. The annealed oligonucleotide pairs were ligated, which resulted in a mixture of products with varying length that represents the varying number of 12 mer repeats ligated to one BbsI/KpnI segment. The products corresponding to the length of 36 amino acids were isolated from the mixture by preparative agarose gel electrophoresis and ligated into the BsaI/KpnI digested stuffer vector pCW0359. Most of the clones in the resulting library designated LCW0401 showed green fluorescence after induction, which shows that the sequence of XTEN_AD36 had been ligated in frame with the GFP gene and that most sequences of XTEN_AD36 had good expression levels.

[0524] We screened 96 isolates from library LCW0401 for high level of fluorescence by stamping them onto agar plate containing IPTG. The same isolates were evaluated by PCR and 48 isolates were identified that contained segments with 36 amino acids as well as strong fluorescence. These isolates were sequenced and 39 clones were identified that contained correct XTEN_AD36 segments. The file names of the nucleotide and amino acid constructs for these segments are listed in Table 9.

TABLE 9
DNA and Amino Acid Sequences for 36-mer motifs

| | | |
|---|---|---|
| File name | Amino acid sequence | Nucleotide sequence |

| | | |
|---|---|---|
| LCW0401_001_GFP- | GSGGEPSESGSSGESPG | GGTTCTGGTGGCGAACCGTCCGAGTCTGGTAGCTCA |
| N_A01.ab1 | GSSGSESGESPGGSSGS | GGTGAATCTCCGGGTGGCTCTAGCGGTTCCGAGTCA |
| | ES | GGTGAATCTCCTGGTGGTTCCAGCGGTTCCGAGTCA |
| LCW0401_002_GFP- | GSEGSSGPGESSGESPG | GGTAGCGAAGGTTCTTCTGGTCCTGGCGAGTCTTCA |
| N_B01.ab1 | GSSGSESGSSESGSSEG | GGTGAATCTCCTGGTGGTTCCAGCGGTTCTGAATCA |
| | GP | GGTTCCTCCGAAAGCGGTTCTTCCGAGGGCGGTCCA |
| LCW0401_003_GFP- | GSSESGSSEGGPGSSES | GGTTCCTCTGAAAGCGGTTCTTCCGAAGGTGGTCCA |
| N_C01.ab1 | GSSEGGPGESPGGSSG | GGTTCCTCTGAAAGCGGTTCTTCTGAGGGTGGTCCA |
| | SES | GGTGAATCTCCGGGTGGCTCCAGCGGTTCCGAGTCA |
| LCW0401_004_GFP- | GSGGEPSESGSSGSSES | GGTTCCGGTGGCGAACCGTCTGAATCTGGTAGCTCA |
| N_D01.ab1 | GSSEGGPGSGGEPSES | GGTTCTTCTGAAAGCGGTTCTTCCGAGGGTGGTCCA |
| | GSS | GGTTCTGGTGGTGAACCTTCCGAGTCTGGTAGCTCA |
| LCW0401_007_GFP- | GSSESGSSEGGPGSEGS | GGTTCTTCCGAAAGCGGTTCTTCTGAGGGTGGTCCA |
| N_F01.ab1 | SGPGESSGSEGSSGPGE | GGTAGCGAAGGTTCTTCCGGTCCAGGTGAGTCTTCA |
| | SS | GGTAGCGAAGGTTCTTCTGGTCCTGGTGAATCTTCA |
| LCW0401_008_GFP- | GSSESGSSEGGPGESPG | GGTTCCTCTGAAAGCGGTTCTTCCGAGGGTGGTCCA |
| N_G01.ab1 | GSSGSESGSEGSSGPGE | GGTGAATCTCCAGGTGGTTCCAGCGGTTCTGAGTCA |
| | SS | GGTAGCGAAGGTTCTTCTGGTCCAGGTGAATCCTCA |
| LCW0401_012_GFP- | GSGGEPSESGSSGSGG | GGTTCTGGTGGTGAACCGTCTGAGTCTGGTAGCTCA |
| N_H01.ab1 | EPSESGSSGSEGSSGPG | GGTTCCGGTGGCGAACCATCCGAATCTGGTAGCTCA |
| | ESS | GGTAGCGAAGGTTCTTCCGGTCCAGGTGAGTCTTCA |
| LCW0401_015_GFP- | GSSESGSSEGGPGSEGS | GGTTCTTCCGAAAGCGGTTCTTCCGAAGGCGGTCCA |
| N_A02.ab1 | SGPGESSGESPGGSSGS | GGTAGCGAAGGTTCTTCTGGTCCAGGCGAATCTTCA |
| | ES | GGTGAATCTCCTGGTGGCTCCAGCGGTTCTGAGTCA |
| LCW0401_016_GFP- | GSSESGSSEGGPGSSES | GGTTCCTCCGAAAGCGGTTCTTCTGAGGGCGGTCCA |
| N_B02.ab1 | GSSEGGPGSSESGSSEG | GGTTCCTCCGAAAGCGGTTCTTCCGAGGGCGGTCCA |
| | GP | GGTTCTTCTGAAAGCGGTTCTTCCGAGGGCGGTCCA |
| LCW0401_020_GFP- | GSGGEPSESGSSGSEGS | GGTTCCGGTGGCGAACCGTCCGAATCTGGTAGCTCA |
| N_E02.ab1 | SGPGESSGSSESGSSEG | GGTAGCGAAGGTTCTTCTGGTCCAGGCGAATCTTCA |
| | GP | GGTTCCTCTGAAAGCGGTTCTTCTGAGGGCGGTCCA |
| LCW0401_022_GFP- | GSGGEPSESGSSGSSES | GGTTCTGGTGGTGAACCGTCCGAATCTGGTAGCTCA |
| N_F02.ab1 | GSSEGGPGSGGEPSES | GGTTCTTCCGAAAGCGGTTCTTCTGAAGGTGGTCCA |
| | GSS | GGTTCCGGTGGCGAACCTTCTGAATCTGGTAGCTCA |
| LCW0401_024_GFP- | GSGGEPSESGSSGSSES | GGTTCTGGTGGCGAACCGTCCGAATCTGGTAGCTCA |
| N_G02.ab1 | GSSEGGPGESPGGSSG | GGTTCCTCCGAAAGCGGTTCTTCTGAAGGTGGTCCA |
| | SES | GGTGAATCTCCAGGTGGTTCTAGCGGTTCTGAATCA |
| LCW0401_026_GFP- | GSGGEPSESGSSGESPG | GGTTCTGGTGGCGAACCGTCTGAGTCTGGTAGCTCA |
| N_H02.ab1 | GSSGSESGSEGSSGPGE | GGTGAATCTCCTGGTGGCTCCAGCGGTTCTGAATCA |
| | SS | GGTAGCGAAGGTTCTTCTGGTCCTGGTGAATCTTCA |
| LCW0401_027_GFP- | GSGGEPSESGSSGESPG | GGTTCCGGTGGCGAACCTTCCGAATCTGGTAGCTCA |
| N_A03.ab1 | GSSGSESGSGGEPSESG | GGTGAATCTCCGGGTGGTTCTAGCGGTTCTGAGTCA |
| | SS | GGTTCTGGTGGTGAACCTTCCGAGTCTGGTAGCTCA |
| LCW0401_028_GFP- | GSSESGSSEGGPGSSES | GGTTCCTCTGAAAGCGGTTCTTCTGAGGGCGGTCCA |
| N_B03.ab1 | GSSEGGPGSSESGSSEG | GGTTCTTCCGAAAGCGGTTCTTCCGAGGGCGGTCCA |
| | GP | GGTTCTTCCGAAAGCGGTTCTTCTGAAGGCGGTCCA |
| LCW0401_030_GFP- | GESPGGSSGSESGSEGS | GGTGAATCTCCGGGTGGCTCCAGCGGTTCTGAGTCA |
| N_C03.ab1 | SGPGESSGSEGSSGPGE | GGTAGCGAAGGTTCTTCCGGTCCGGGTGAGTCCTCA |
| | SS | GGTAGCGAAGGTTCTTCCGGTCCTGGTGAGTCTTCA |
| LCW0401_031_GFP- | GSGGEPSESGSSGSGG | GGTTCTGGTGGCGAACCTTCCGAATCTGGTAGCTCA |
| N_D03.ab1 | EPSESGSSGSSESGSSE | GGTTCCGGTGGTGAACCTTCTGAATCTGGTAGCTCA |
| | GGP | GGTTCTTCTGAAAGCGGTTCTTCCGAGGGCGGTCCA |
| LCW0401_033_GFP- | GSGGEPSESGSSGSGG | GGTTCCGGTGGTGAACCTTCTGAATCTGGTAGCTCA |
| N_E03.ab1 | EPSESGSSGSGGEPSES | GGTTCCGGTGGCGAACCATCCGAGTCTGGTAGCTCA |
| | GSS | GGTTCCGGTGGTGAACCATCCGAGTCTGGTAGCTCA |
| LCW0401_037_GFP- | GSGGEPSESGSSGSSES | GGTTCCGGTGGCGAACCTTCTGAATCTGGTAGCTCA |
| N_F03.ab1 | GSSEGGPGSEGSSGPG | GGTTCCTCCGAAAGCGGTTCTTCTGAGGGCGGTCCA |
| | ESS | GGTAGCGAAGGTTCTTCTGGTCCGGGCGAGTCTTCA |
| LCW0401_038_GFP- | GSGGEPSESGSSGSEGS | GGTTCCGGTGGTGAACCGTCCGAGTCTGGTAGCTCA |
| N_G03.ab1 | SGPGESSGSGGEPSESG | GGTAGCGAAGGTTCTTCTGGTCCGGGTGAGTCTTCA |
| | SS | GGTTCTGGTGGCGAACCGTCCGAATCTGGTAGCTCA |
| LCW0401_039_GFP- | GSGGEPSESGSSGESPG | GGTTCTGGTGGCGAACCGTCCGAATCTGGTAGCTCA |
| N_H03.ab1 | GSSGSESGSGGEPSESG | GGTGAATCTCCTGGTGGTTCCAGCGGTTCCGAGTCA |
| | SS | GGTTCTGGTGGCGAACCTTCCGAATCTGGTAGCTCA |
| LCW0401_040_GFP- | GSSESGSSEGGPGSGG | GGTTCTTCCGAAAGCGGTTCTTCCGAGGGCGGTCCA |
| N_A04.ab1 | EPSESGSSGSSESGSSE | GGTTCCGGTGGTGAACCATCTGAATCTGGTAGCTCA |
| | GGP | GGTTCTTCTGAAAGCGGTTCTTCTGAAGGTGGTCCA |
| LCW0401_042_GFP- | GSEGSSGPGESSGESPG | GGTAGCGAAGGTTCTTCCGGTCCTGGTGAGTCTTCA |
| N_C04.ab1 | GSSGSESGSEGSSGPGE | GGTGAATCTCCAGGTGGCTCTAGCGGTTCCGAGTCA |
| | SS | GGTAGCGAAGGTTCTTCTGGTCCTGGCGAGTCCTCA |
| LCW0401_046_GFP- | GSSESGSSEGGPGSSES | GGTTCCTCTGAAAGCGGTTCTTCCGAAGGCGGTCCA |
| N_D04.ab1 | GSSEGGPGSSESGSSEG | GGTTCTTCCGAAAGCGGTTCTTCTGAGGGCGGTCCA |
| | GP | GGTTCCTCCGAAAGCGGTTCTTCTGAGGGTGGTCCA |
| LCW0401_047_GFP- | GSGGEPSESGSSGESPG | GGTTCTGGTGGCGAACCTTCCGAGTCTGGTAGCTCA |
| N_E04.ab1 | GSSGSESGESPGGSSGS | GGTGAATCTCCGGGTGGTTCTAGCGGTTCCGAGTCA |
| | ES | GGTGAATCTCCGGGTGGTTCCAGCGGTTCTGAGTCA |
| LCW0401_051_GFP- | GSGGEPSESGSSGSEGS | GGTTCTGGTGGCGAACCATCTGAGTCTGGTAGCTCA |
| N_F04.ab1 | SGPGESSGESPGGSSGS | GGTAGCGAAGGTTCTTCCGGTCCAGGCGAGTCTTCA |
| | ES | GGTGAATCTCCTGGTGGCTCCAGCGGTTCTGAGTCA |
| LCW0401_053_GFP- | GESPGGSSGSESGESPG | GGTGAATCTCCTGGTGGTTCCAGCGGTTCCGAGTCA |
| N_H04.ab1 | GSSGSESGESPGGSSGS | GGTGAATCTCCAGGTGGCTCTAGCGGTTCCGAGTCA |
| | ES | GGTGAATCTCCTGGTGGTTCTAGCGGTTCTGAATCA |
| LCW0401_054_GFP- | GSEGSSGPGESSGSEGS | GGTAGCGAAGGTTCTTCCGGTCCAGGTGAATCTTCA |
| N_A05.ab1 | SGPGESSGSGGEPSESG | GGTAGCGAAGGTTCTTCTGGTCCTGGTGAATCCTCA |
| | SS | GGTTCCGGTGGCGAACCATCTGAATCTGGTAGCTCA |
| LCW0401_059_GFP- | GSGGEPSESGSSGSEGS | GGTTCTGGTGGCGAACCATCCGAATCTGGTAGCTCA |
| N_D05.ab1 | SGPGESSGESPGGSSGS | GGTAGCGAAGGTTCTTCTGGTCCTGGCGAATCTTCA |
| | ES | GGTGAATCTCCAGGTGGCTCTAGCGGTTCCGAATCA |
| LCW0401_060_GFP- | GSGGEPSESGSSGSSES | GGTTCCGGTGGTGAACCGTCCGAATCTGGTAGCTCA |
| N_E05.ab1 | GSSEGGPGSGGEPSES | GGTTCCTCTGAAAGCGGTTCTTCCGAGGGTGGTCCA |
| | GSS | GGTTCCGGTGGTGAACCTTCTGAGTCTGGTAGCTCA |
| LCW0401_061_GFP- | GSSESGSSEGGPGSGG | GGTTCCTCTGAAAGCGGTTCTTCTGAGGGCGGTCCA |
| N_F05.ab1 | EPSESGSSGSEGSSGPG | GGTTCTGGTGGCGAACCATCTGAATCTGGTAGCTCA |
| | ESS | GGTAGCGAAGGTTCTTCCGGTCCGGGTGAATCTTCA |
| LCW0401_063_GFP- | GSGGEPSESGSSGSEGS | GGTTCTGGTGGTGAACCGTCCGAATCTGGTAGCTCA |
| N_H05.ab1 | SGPGESSGSEGSSGPGE | GGTAGCGAAGGTTCTTCTGGTCCTGGCGAGTCTTCA |
| | SS | GGTAGCGAAGGTTCTTCTGGTCCTGGTGAATCTTCA |
| LCW0401_066_GFP- | GSGGEPSESGSSGSSES | GGTTCTGGTGGCGAACCATCCGAGTCTGGTAGCTCA |
| N_B06.ab1 | GSSEGGPGSGGEPSES | GGTTCTTCCGAAAGCGGTTCTTCCGAAGGCGGTCCA |
| | GSS | GGTTCTGGTGGTGAACCGTCCGAATCTGGTAGCTCA |
| LCW0401_067_GFP- | GSGGEPSESGSSGESPG | GGTTCCGGTGGCGAACCTTCCGAATCTGGTAGCTCA |
| N_C06.ab1 | GSSGSESGESPGGSSGS | GGTGAATCTCCGGGTGGTTCTAGCGGTTCCGAATCA |
| | ES | GGTGAATCTCCAGGTGGTTCTAGCGGTTCCGAATCA |
| LCW0401_069_GFP- | GSGGEPSESGSSGSGG | GGTTCCGGTGGTGAACCATCTGAGTCTGGTAGCTCA |
| N_D06.ab1 | EPSESGSSGESPGGSSG | GGTTCCGGTGGCGAACCGTCCGAGTCTGGTAGCTCA |
| | SES | GGTGAATCTCCGGGTGGTTCCAGCGGTTCCGAATCA |
| LCW0401_070_GFP- | GSEGSSGPGESSGSSES | GGTAGCGAAGGTTCTTCTGGTCCGGGCGAATCCTCA |
| N_E06.ab1 | GSSEGGPGSEGSSGPG | GGTTCCTCCGAAAGCGGTTCTTCCGAAGGTGGTCCA |
| | ESS | GGTAGCGAAGGTTCTTCCGGTCCTGGTGAATCTTCA |
| LCW0401_078_GFP- | GSSESGSSEGGPGESPG | GGTTCCTCTGAAAGCGGTTCTTCTGAAGGCGGTCCA |
| N_F06.ab1 | GSSGSESGESPGGSSGS | GGTGAATCTCCGGGTGGCTCCAGCGGTTCTGAATCA |
| | ES | GGTGAATCTCCTGGTGGCTCCAGCGGTTCCGAGTCA |
| LCW0401_079_GFP- | GSEGSSGPGESSGSEGS | GGTAGCGAAGGTTCTTCTGGTCCAGGCGAGTCTTCA |
| N_G06.ab1 | SGPGESSGSGGEPSESG | GGTAGCGAAGGTTCTTCCGGTCCTGGCGAGTCTTCA |
| | SS | GGTTCCGGTGGCGAACCGTCCGAATCTGGTAGCTCA |

### Example 2

### Construction of XTEN_AE36 Segments

[0525] A codon library encoding XTEN sequences of 36 amino acid length was constructed. The XTEN sequence was designated XTEN_AE36. Its segments have the amino acid sequence [X]₃ where X is a 12 mer peptide with the sequence: GSPAGSPTSTEE, GSEPATSGSE TP, GTSESA TPESGP, or GTSTEPSEGSAP. The insert was obtained by annealing the following pairs of phosphorylated synthetic oligonucleotide pairs:

AE1for: AGGTAGCCCDGCWGGYTCTCCDACYTCYACYGARGA
AE1rev: ACCTTCYTCRGTRGARGTHGGAGARCCWGCHGGGCT
AE2for: AGGTAGCGAACCKGCWACYTCYGGYTCTGARACYCC
AE2rev: ACCTGGRGTYTCAGARCCRGARGTWGCMGGTTCGCT
AE3for: AGGTACYTCTGAAAGCGCWACYCCKGARTCYGGYCC
AE3rev: ACCTGGRCCRGAYTCMGGRGTWGCGCTTTCAGARGT
AE4for: AGGTACYTCTACYGAACCKTCYGARGGYAGCGCWCC
AE4rev: ACCTGGWGCGCTRCCYTCRGAMGGTTCRGTAGARGT

[0526] We also annealed the phosphorylated oligonucleotide “3KpnIstopperFor”: AGGTTCGTCTTCACTCGAGGGTAC and the non-phosphorylated oligonucleotide “pr_{—}3KpnIstopperRev”: CCTCGAGTGAAGACGA. The annealed oligonucleotide pairs were ligated, which resulted in a mixture of products with varying length that represents the varying number of 12 mer repeats ligated to one BbsI/KpnI segment. The products corresponding to the length of 36 amino acids were isolated from the mixture by preparative agarose gel electrophoresis and ligated into the BsaI/KpnI digested stuffer vector pCW0359. Most of the clones in the resulting library designated LCW0402 showed green fluorescence after induction which shows that the sequence of XTEN_AE36 had been ligated in frame with the GFP gene and most sequences of XTEN_AE36 show good expression.

[0527] We screened 96 isolates from library LCW0402 for high level of fluorescence by stamping them onto agar plate containing IPTG. The same isolates were evaluated by PCR and 48 isolates were identified that contained segments with 36 amino acids as well as strong fluorescence. These isolates were sequenced and 37 clones were identified that contained correct XTEN_AE36 segments. The file names of the nucleotide and amino acid constructs for these segments are listed in Table 10.

TABLE 10
DNA and Amino Acid Sequences for 36-mer motifs

| | | |
|---|---|---|
| File name | Amino acid sequence | Nucleotide sequence |

| | | |
|---|---|---|
| LCW0402_002_GFP- | GSPAGSPTSTEEGTSE | GGTAGCCCGGCAGGCTCTCCGACCTCTACTGAGGAAG |
| N_A07.ab1 | SATPESGPGTSTEPSE | GTACTTCTGAAAGCGCAACCCCGGAGTCCGGCCCAGG |
| | GSAP | TACCTCTACCGAACCGTCTGAGGGCAGCGCACCA |
| LCW0402_003_GFP- | GTSTEPSEGSAPGTST | GGTACTTCTACCGAACCGTCCGAAGGCAGCGCTCCAG |
| N_B07.ab1 | EPSEGSAPGTSTEPSE | GTACCTCTACTGAACCTTCCGAGGGCAGCGCTCCAGGT |
| | GSAP | ACCTCTACCGAACCTTCTGAAGGTAGCGCACCA |
| LCW0402_004_GFP- | GTSTEPSEGSAPGTSE | GGTACCTCTACCGAACCGTCTGAAGGTAGCGCACCAG |
| N_C07.ab1 | SATPESGPGTSESATP | GTACCTCTGAAAGCGCAACTCCTGAGTCCGGTCCAGGT |
| | ESGP | ACTTCTGAAAGCGCAACCCCGGAGTCTGGCCCA |
| LCW0402_005_GFP- | GTSTEPSEGSAPGTSE | GGTACTTCTACTGAACCGTCTGAAGGTAGCGCACCAG |
| N_D07.ab1 | SATPESGPGTSESATP | GTACTTCTGAAAGCGCAACCCCGGAATCCGGCCCAGG |
| | ESGP | TACCTCTGAAAGCGCAACCCCGGAGTCCGGCCCA |
| LCW0402_006_GFP- | GSEPATSGSETPGTSE | GGTAGCGAACCGGCAACCTCCGGCTCTGAAACCCCAG |
| N_E07.ab1 | SATPESGPGSPAGSPT | GTACCTCTGAAAGCGCTACTCCTGAATCCGGCCCAGGT |
| | STEE | AGCCCGGCAGGTTCTCCGACTTCCACTGAGGAA |
| LCW0402_008_GFP- | GTSESATPESGPGSEP | GGTACTTCTGAAAGCGCAACCCCTGAATCCGGTCCAG |
| N_F07.ab1 | ATSGSETPGTSTEPSE | GTAGCGAACCGGCTACTTCTGGCTCTGAGACTCCAGGT |
| | GSAP | ACTTCTACCGAACCGTCCGAAGGTAGCGCACCA |
| LCW0402_009_GFP- | GSPAGSPTSTEEGSPA | GGTAGCCCGGCTGGCTCTCCAACCTCCACTGAGGAAG |
| N_G07.ab1 | GSPTSTEEGSEPATSG | GTAGCCCGGCTGGCTCTCCAACCTCCACTGAAGAAGG |
| | SETP | TAGCGAACCGGCTACCTCCGGCTCTGAAACTCCA |
| LCW0402_011_GFP- | GSPAGSPTSTEEGTSE | GGTAGCCCGGCTGGCTCTCCTACCTCTACTGAGGAAGG |
| N_A08.ab1 | SATPESGPGTSTEPSE | TACTTCTGAAAGCGCTACTCCTGAGTCTGGTCCAGGTA |
| | GSAP | CCTCTACTGAACCGTCCGAAGGTAGCGCTCCA |
| LCW0402_012_GFP- | GSPAGSPTSTEEGSPA | GGTAGCCCTGCTGGCTCTCCGACTTCTACTGAGGAAGG |
| N_B08.ab1 | GSPTSTEEGTSTEPSE | TAGCCCGGCTGGTTCTCCGACTTCTACTGAGGAAGGTA |
| | GSAP | CTTCTACCGAACCTTCCGAAGGTAGCGCTCCA |
| LCW0402_013_GFP- | GTSESATPESGPGTST | GGTACTTCTGAAAGCGCTACTCCGGAGTCCGGTCCAG |
| N_C08.ab1 | EPSEGSAPGTSTEPSE | GTACCTCTACCGAACCGTCCGAAGGCAGCGCTCCAGG |
| | GSAP | TACTTCTACTGAACCTTCTGAGGGTAGCGCTCCA |
| LCW0402_014_GFP- | GTSTEPSEGSAPGSPA | GGTACCTCTACCGAACCTTCCGAAGGTAGCGCTCCAG |
| N_D08.ab1 | GSPTSTEEGTSTEPSE | GTAGCCCGGCAGGTTCTCCTACTTCCACTGAGGAAGGT |
| | GSAP | ACTTCTACCGAACCTTCTGAGGGTAGCGCACCA |
| LCW0402_015_GFP- | GSEPATSGSETPGSPA | GGTAGCGAACCGGCTACTTCCGGCTCTGAGACTCCAG |
| N_E08.ab1 | GSPTSTEEGTSESATP | GTAGCCCTGCTGGCTCTCCGACCTCTACCGAAGAAGGT |
| | ESGP | ACCTCTGAAAGCGCTACCCCTGAGTCTGGCCCA |
| LCW0402_016_GFP- | GTSTEPSEGSAPGTSE | GGTACTTCTACCGAACCTTCCGAGGGCAGCGCACCAG |
| N_F08.ab1 | SATPESGPGTSESATP | GTACTTCTGAAAGCGCTACCCCTGAGTCCGGCCCAGGT |
| | ESGP | ACTTCTGAAAGCGCTACTCCTGAATCCGGTCCA |
| LCW0402_020_GFP- | GTSTEPSEGSAPGSEP | GGTACTTCTACTGAACCGTCTGAAGGCAGCGCACCAG |
| N_G08.ab1 | ATSGSETPGSPAGSPT | GTAGCGAACCGGCTACTTCCGGTTCTGAAACCCCAGGT |
| | STEE | AGCCCAGCAGGTTCTCCAACTTCTACTGAAGAA |
| LCW0402_023_GFP- | GSPAGSPTSTEEGTSE | GGTAGCCCTGCTGGCTCTCCAACCTCCACCGAAGAAG |
| N_A09.ab1 | SATPESGPGSEPATSG | GTACCTCTGAAAGCGCAACCCCTGAATCCGGCCCAGG |
| | SETP | TAGCGAACCGGCAACCTCCGGTTCTGAAACCCCA |
| LCW0402_024_GFP- | GTSESATPESGPGSPA | GGTACTTCTGAAAGCGCTACTCCTGAGTCCGGCCCAGG |
| N_B09.ab1 | GSPTSTEEGSPAGSPT | TAGCCCGGCTGGCTCTCCGACTTCCACCGAGGAAGGT |
| | STEE | AGCCCGGCTGGCTCTCCAACTTCTACTGAAGAA |
| LCW0402_025_GFP- | GTSTEPSEGSAPGTSE | GGTACCTCTACTGAACCTTCTGAGGGCAGCGCTCCAGG |
| N_C09.ab1 | SATPESGPGTSTEPSE | TACTTCTGAAAGCGCTACCCCGGAGTCCGGTCCAGGTA |
| | GSAP | CTTCTACTGAACCGTCCGAAGGTAGCGCACCA |
| LCW0402_026_GFP- | GSPAGSPTSTEEGTST | GGTAGCCCGGCAGGCTCTCCGACTTCCACCGAGGAAG |
| N_D09.ab1 | EPSEGSAPGSEPATSG | GTACCTCTACTGAACCTTCTGAGGGTAGCGCTCCAGGT |
| | SETP | AGCGAACCGGCAACCTCTGGCTCTGAAACCCCA |
| LCW0402_027_GFP- | GSPAGSPTSTEEGTST | GGTAGCCCAGCAGGCTCTCCGACTTCCACTGAGGAAG |
| N_E09.ab1 | EPSEGSAPGTSTEPSE | GTACTTCTACTGAACCTTCCGAAGGCAGCGCACCAGGT |
| | GSAP | ACCTCTACTGAACCTTCTGAGGGCAGCGCTCCA |
| LCW0402_032_GFP- | GSEPATSGSETPGTSE | GGTAGCGAACCTGCTACCTCCGGTTCTGAAACCCCAG |
| N_H09.ab1 | SATPESGPGSPAGSPT | GTACCTCTGAAAGCGCAACTCCGGAGTCTGGTCCAGG |
| | STEE | TAGCCCTGCAGGTTCTCCTACCTCCACTGAGGAA |
| LCW0402_034_GFP- | GTSESATPESGPGTST | GGTACCTCTGAAAGCGCTACTCCGGAGTCTGGCCCAG |
| N_A10.ab1 | EPSEGSAPGTSTEPSE | GTACCTCTACTGAACCGTCTGAGGGTAGCGCTCCAGGT |
| | GSAP | ACTTCTACTGAACCGTCCGAAGGTAGCGCACCA |
| LCW0402_036_GFP- | GSPAGSPTSTEEGTST | GGTAGCCCGGCTGGTTCTCCGACTTCCACCGAGGAAG |
| N_C10.ab1 | EPSEGSAPGTSTEPSE | GTACCTCTACTGAACCTTCTGAGGGTAGCGCTCCAGGT |
| | GSAP | ACCTCTACTGAACCTTCCGAAGGCAGCGCTCCA |
| LCW0402_039_GFP- | GTSTEPSEGSAPGTST | GGTACTTCTACCGAACCGTCCGAGGGCAGCGCTCCAG |
| N_E10.ab1 | EPSEGSAPGTSTEPSE | GTACTTCTACTGAACCTTCTGAAGGCAGCGCTCCAGGT |
| | GSAP | ACTTCTACTGAACCTTCCGAAGGTAGCGCACCA |
| LCW0402_040_GFP- | GSEPATSGSETPGTSE | GGTAGCGAACCTGCAACCTCTGGCTCTGAAACCCCAG |
| N_F10.ab1 | SATPESGPGTSTEPSE | GTACCTCTGAAAGCGCTACTCCTGAATCTGGCCCAGGT |
| | GSAP | ACTTCTACTGAACCGTCCGAGGGCAGCGCACCA |
| LCW0402_041_GFP- | GTSTEPSEGSAPGSPA | GGTACTTCTACCGAACCGTCCGAGGGTAGCGCACCAG |
| N_G10.ab1 | GSPTSTEEGTSTEPSE | GTAGCCCAGCAGGTTCTCCTACCTCCACCGAGGAAGG |
| | GSAP | TACTTCTACCGAACCGTCCGAGGGTAGCGCACCA |
| LCW0402_050_GFP- | GSEPATSGSETPGTSE | GGTAGCGAACCGGCAACCTCCGGCTCTGAAACTCCAG |
| N_A11.ab1 | SATPESGPGSEPATSG | GTACTTCTGAAAGCGCTACTCCGGAATCCGGCCCAGGT |
| | SETP | AGCGAACCGGCTACTTCCGGCTCTGAAACCCCA |
| LCW0402_051_GFP- | GSEPATSGSETPGTSE | GGTAGCGAACCGGCAACTTCCGGCTCTGAAACCCCAG |
| N_B11.ab1 | SATPESGPGSEPATSG | GTACTTCTGAAAGCGCTACTCCTGAGTCTGGCCCAGGT |
| | SETP | AGCGAACCTGCTACCTCTGGCTCTGAAACCCCA |
| LCW0402_059_GFP- | GSEPATSGSETPGSEP | GGTAGCGAACCGGCAACCTCTGGCTCTGAAACTCCAG |
| N_E11.ab1 | ATSGSETPGTSTEPSE | GTAGCGAACCTGCAACCTCCGGCTCTGAAACCCCAGG |
| | GSAP | TACTTCTACTGAACCTTCTGAGGGCAGCGCACCA |
| LCW0402_060_GFP- | GTSESATPESGPGSEP | GGTACTTCTGAAAGCGCTACCCCGGAATCTGGCCCAG |
| N_F11.ab1 | ATSGSETPGSEPATSG | GTAGCGAACCGGCTACTTCTGGTTCTGAAACCCCAGGT |
| | SETP | AGCGAACCGGCTACCTCCGGTTCTGAAACTCCA |
| LCW0402_061_GFP- | GTSTEPSEGSAPGTST | GGTACCTCTACTGAACCTTCCGAAGGCAGCGCTCCAG |
| N_G11.ab1 | EPSEGSAPGTSESATP | GTACCTCTACCGAACCGTCCGAGGGCAGCGCACCAGG |
| | ESGP | TACTTCTGAAAGCGCAACCCCTGAATCCGGTCCA |
| LCW0402_065_GFP- | GSEPATSGSETPGTSE | GGTAGCGAACCGGCAACCTCTGGCTCTGAAACCCCAG |
| N_A12.ab1 | SATPESGPGTSESATP | GTACCTCTGAAAGCGCTACTCCGGAATCTGGTCCAGGT |
| | ESGP | ACTTCTGAAAGCGCTACTCCGGAATCCGGTCCA |
| LCW0402_066_GFP- | GSEPATSGSETPGSEP | GGTAGCGAACCTGCTACCTCCGGCTCTGAAACTCCAG |
| N_B12.ab1 | ATSGSETPGTSTEPSE | GTAGCGAACCGGCTACTTCCGGTTCTGAAACTCCAGGT |
| | GSAP | ACCTCTACCGAACCTTCCGAAGGCAGCGCACCA |
| LCW0402_067_GFP- | GSEPATSGSETPGTST | GGTAGCGAACCTGCTACTTCTGGTTCTGAAACTCCAGG |
| N_C12.ab1 | EPSEGSAPGSEPATSG | TACTTCTACCGAACCGTCCGAGGGTAGCGCTCCAGGTA |
| | SETP | GCGAACCTGCTACTTCTGGTTCTGAAACTCCA |
| LCW0402_069_GFP- | GTSTEPSEGSAPGTST | GGTACCTCTACCGAACCGTCCGAGGGTAGCGCACCAG |
| N_D12.ab1 | EPSEGSAPGSEPATSG | GTACCTCTACTGAACCGTCTGAGGGTAGCGCTCCAGGT |
| | SETP | AGCGAACCGGCAACCTCCGGTTCTGAAACTCCA |
| LCW0402_073_GFP- | GTSTEPSEGSAPGSEP | GGTACTTCTACTGAACCTTCCGAAGGTAGCGCTCCAGG |
| N_F12.ab1 | ATSGSETPGSPAGSPT | TAGCGAACCTGCTACTTCTGGTTCTGAAACCCCAGGTA |
| | STEE | GCCCGGCTGGCTCTCCGACCTCCACCGAGGAA |
| LCW0402_074_GFP- | GSEPATSGSETPGSPA | GGTAGCGAACCGGCTACTTCCGGCTCTGAGACTCCAG |
| N_G12.ab1 | GSPTSTEEGTSESATP | GTAGCCCAGCTGGTTCTCCAACCTCTACTGAGGAAGGT |
| | ESGP | ACTTCTGAAAGCGCTACCCCTGAATCTGGTCCA |
| LCW0402_075_GFP- | GTSESATPESGPGSEP | GGTACCTCTGAAAGCGCAACTCCTGAGTCTGGCCCAG |
| N_H12.ab1 | ATSGSETPGTSESATP | GTAGCGAACCTGCTACCTCCGGCTCTGAGACTCCAGGT |
| | ESGP | ACCTCTGAAAGCGCAACCCCGGAATCTGGTCCA |

### Example 3

### Construction of XTEN_AF36 Segments

[0528] A codon library encoding sequences of 36 amino acid length was constructed. The sequences were designated XTEN_AF36. Its segments have the amino acid sequence [X]3 where X is a 12 mer peptide with the sequence: GSTSESPSGTAP, GTSTPESGSASP, GTSPSGESSTAP, or GSTSSTAESPGP. The insert was obtained by annealing the following pairs of phosphorylated synthetic oligonucleotide pairs:

AF1for: AGGTTCTACYAGCGAATCYCCKTCTGGYACYGCWCC
AF1rev: ACCTGGWGCRGTRCCAGAMGGRGATTCGCTRGTAGA
AF2for: AGGTACYTCTACYCCKGAAAGCGGYTCYGCWTCTCC
AF2rev: ACCTGGAGAWGCRGARCCGCTTTCMGGRGTAGARGT
AF3for: AGGTACYTCYCCKAGCGGYGAATCTTCTACYGCWCC
AF3rev: ACCTGGWGCRGTAGAAGATTCRCCGCTMGGRGARGT
AF4for: AGGTTCYACYAGCTCTACYGCWGAATCTCCKGGYCC
AF4rev: ACCTGGRCCMGGAGATTCWGCRGTAGAGCTRGTRGA

[0529] We also annealed the phosphorylated oligonucleotide “3KpnIstopperFor”: AGGTTCGTCTTCACTCGAGGGTAC and the non-phosphorylated oligonucleotide “pr_{—}3KpnIstopperRev”: CCTCGAGTGAAGACGA. The annealed oligonucleotide pairs were ligated, which resulted in a mixture of products with varying length that represents the varying number of 12 mer repeats ligated to one BbsI/KpnI segment The products corresponding to the length of 36 amino acids were isolated from the mixture by preparative agarose gel electrophoresis and ligated into the BsaI/KpnI digested stuffer vector pCW0359. Most of the clones in the resulting library designated LCW0403 showed green fluorescence after induction which shows that the sequence of XTEN_AF36 had been ligated in frame with the GFP gene and most sequences of XTEN_AF36 show good expression.

[0530] We screened 96 isolates from library LCW0403 for high level of fluorescence by stamping them onto agar plate containing IPTG. The same isolates were evaluated by PCR and 48 isolates were identified that contained segments with 36 amino acids as well as strong fluorescence. These isolates were sequenced and 44 clones were identified that contained correct XTEN_AF36 segments. The file names of the nucleotide and amino acid constructs for these segments are listed in Table 11.

TABLE 11
DNA and Amino Acid Sequences for 36-mer motifs

| | | |
|---|---|---|
| File name | Amino acid sequence | Nucleotide sequence |

| | | |
|---|---|---|
| LCW0403_004_GFP- | GTSTPESGSASPGTSP | GGTACTTCTACTCCGGAAAGCGGTTCCGCATCTCCA |
| N_A01.ab1 | SGESSTAPGTSPSGES | GGTACTTCTCCTAGCGGTGAATCTTCTACTGCTCCAG |
| | STAP | GTACCTCTCCTAGCGGCGAATCTTCTACTGCTCCA |
| LCW0403_005_GFP- | GTSPSGESSTAPGSTS | GGTACTTCTCCGAGCGGTGAATCTTCTACCGCACCA |
| N_B01.ab1 | STAESPGPGTSPSGES | GGTTCTACTAGCTCTACCGCTGAATCTCCGGGCCCAG |
| | STAP | GTACTTCTCCGAGCGGTGAATCTTCTACTGCTCCA |
| LCW0403_006_GFP- | GSTSSTAESPGPGTSP | GGTTCCACCAGCTCTACTGCTGAATCTCCTGGTCCAG |
| N_C01.ab1 | SGESSTAPGTSTPESG | GTACCTCTCCTAGCGGTGAATCTTCTACTGCTCCAGG |
| | SASP | TACTTCTACTCCTGAAAGCGGCTCTGCTTCTCCA |
| LCW0403_007_GFP- | GSTSSTAESPGPGSTS | GGTTCTACCAGCTCTACTGCAGAATCTCCTGGCCCAG |
| N_D01.ab1 | STAESPGPGTSPSGES | GTTCCACCAGCTCTACCGCAGAATCTCCGGGTCCAG |
| | STAP | GTACTTCCCCTAGCGGTGAATCTTCTACCGCACCA |
| LCW0403_008_GFP- | GSTSSTAESPGPGTSP | GGTTCTACTAGCTCTACTGCTGAATCTCCTGGCCCAG |
| N_E01.ab1 | SGESSTAPGTSTPESG | GTACTTCTCCTAGCGGTGAATCTTCTACCGCTCCAGG |
| | SASP | TACCTCTACTCCGGAAAGCGGTTCTGCATCTCCA |
| LCW0403_010_GFP- | GSTSSTAESPGPGTST | GGTTCTACCAGCTCTACCGCAGAATCTCCTGGTCCAG |
| N_F01.ab1 | PESGSASPGSTSESPS | GTACCTCTACTCCGGAAAGCGGCTCTGCATCTCCAG |
| | GTAP | GTTCTACTAGCGAATCTCCTTCTGGCACTGCACCA |
| LCW0403_011_GFP- | GSTSSTAESPGPGTST | GGTTCTACTAGCTCTACTGCAGAATCTCCTGGCCCAG |
| N_G01.ab1 | PESGSASPGTSTPESG | GTACCTCTACTCCGGAAAGCGGCTCTGCATCTCCAG |
| | SASP | GTACTTCTACCCCTGAAAGCGGTTCTGCATCTCCA |
| LCW0403_012_GFP- | GSTSESPSGTAPGTSP | GGTTCTACCAGCGAATCTCCTTCTGGCACCGCTCCAG |
| N_H01.ab1 | SGESSTAPGSTSESPS | GTACCTCTCCTAGCGGCGAATCTTCTACCGCTCCAGG |
| | GTAP | TTCTACTAGCGAATCTCCTTCTGGCACTGCACCA |
| LCW0403_013_GFP- | GSTSSTAESPGPGSTS | GGTTCCACCAGCTCTACTGCAGAATCTCCGGGCCCA |
| N_A02.ab1 | STAESPGPGTSPSGES | GGTTCTACTAGCTCTACTGCAGAATCTCCGGGTCCAG |
| | STAP | GTACTTCTCCTAGCGGCGAATCTTCTACCGCTCCA |
| LCW0403_014_GFP- | GSTSSTAESPGPGTST | GGTTCCACTAGCTCTACTGCAGAATCTCCTGGCCCAG |
| N_B02.ab1 | PESGSASPGSTSESPS | GTACCTCTACCCCTGAAAGCGGCTCTGCATCTCCAG |
| | GTAP | GTTCTACCAGCGAATCCCCGTCTGGCACCGCACCA |
| LCW0403_015_GFP- | GSTSSTAESPGPGSTS | GGTTCTACTAGCTCTACTGCTGAATCTCCGGGTCCAG |
| N_C02.ab1 | STAESPGPGTSPSGES | GTTCTACCAGCTCTACTGCTGAATCTCCTGGTCCAGG |
| | STAP | TACCTCCCCGAGCGGTGAATCTTCTACTGCACCA |
| LCW0403_017_GFP- | GSTSSTAESPGPGSTS | GGTTCTACCAGCTCTACCGCTGAATCTCCTGGCCCAG |
| N_D02.ab1 | ESPSGTAPGSTSSTAE | GTTCTACCAGCGAATCCCCGTCTGGCACCGCACCAG |
| | SPGP | GTTCTACTAGCTCTACCGCTGAATCTCCGGGTCCA |
| LCW0403_018_GFP- | GSTSSTAESPGPGSTS | GGTTCTACCAGCTCTACCGCAGAATCTCCTGGCCCA |
| N_E02.ab1 | STAESPGPGSTSSTAE | GGTTCCACTAGCTCTACCGCTGAATCTCCTGGTCCAG |
| | SPGP | GTTCTACTAGCTCTACCGCTGAATCTCCTGGTCCA |
| LCW0403_019_GFP- | GSTSESPSGTAPGSTS | GGTTCTACTAGCGAATCCCCTTCTGGTACTGCTCCAG |
| N_F02.ab1 | STAESPGPGSTSSTAE | GTTCCACTAGCTCTACCGCTGAATCTCCTGGCCCAGG |
| | SPGP | TTCCACTAGCTCTACTGCAGAATCTCCTGGTCCA |
| LCW0403_023_GFP- | GSTSESPSGTAPGSTS | GGTTCTACTAGCGAATCTCCTTCTGGTACCGCTCCAG |
| N_H02.ab1 | ESPSGTAPGSTSESPS | GTTCTACCAGCGAATCCCCGTCTGGTACTGCTCCAGG |
| | GTAP | TTCTACCAGCGAATCTCCTTCTGGTACTGCACCA |
| LCW0403_024_GFP- | GSTSSTAESPGPGSTS | GGTTCCACCAGCTCTACTGCTGAATCTCCTGGCCCAG |
| N_A03.ab1 | STAESPGPGSTSSTAE | GTTCTACCAGCTCTACTGCTGAATCTCCGGGCCCAGG |
| | SPGP | TTCCACCAGCTCTACCGCTGAATCTCCGGGTCCA |
| LCW0403_025_GFP- | GSTSSTAESPGPGSTS | GGTTCCACTAGCTCTACCGCAGAATCTCCTGGTCCAG |
| N_B03.ab1 | STAESPGPGTSPSGES | GTTCTACTAGCTCTACTGCTGAATCTCCGGGTCCAGG |
| | STAP | TACCTCCCCTAGCGGCGAATCTTCTACCGCTCCA |
| LCW0403_028_GFP- | GSSPSASTGTGPGSST | GGTTCTAGCCCTTCTGCTTCCACCGGTACCGGCCCAG |
| N_D03.ab1 | PSGATGSPGSSTPSGA | GTAGCTCTACTCCGTCTGGTGCAACTGGCTCTCCAGG |
| | TGSP | TAGCTCTACTCCGTCTGGTGCAACCGGCTCCCCA |
| LCW0403_029_GFP- | GTSPSGESSTAPGTST | GGTACTTCCCCTAGCGGTGAATCTTCTACTGCTCCAG |
| N_E03.ab1 | PESGSASPGSTSSTAE | GTACCTCTACTCCGGAAAGCGGCTCCGCATCTCCAG |
| | SPGP | GTTCTACTAGCTCTACTGCTGAATCTCCTGGTCCA |
| LCW0403_030_GFP- | GSTSSTAESPGPGSTS | GGTTCTACTAGCTCTACCGCTGAATCTCCGGGTCCAG |
| N_F03.ab1 | STAESPGPGTSTPESG | GTTCTACCAGCTCTACTGCAGAATCTCCTGGCCCAGG |
| | SASP | TACTTCTACTCCGGAAAGCGGTTCCGCTTCTCCA |
| LCW0403_031_GFP- | GTSPSGESSTAPGSTS | GGTACTTCTCCTAGCGGTGAATCTTCTACCGCTCCAG |
| N_G03.ab1 | STAESPGPGTSTPESG | GTTCTACCAGCTCTACTGCTGAATCTCCTGGCCCAGG |
| | SASP | TACTTCTACCCCGGAAAGCGGCTCCGCTTCTCCA |
| LCW0403_033_GFP- | GSTSESPSGTAPGSTS | GGTTCTACTAGCGAATCCCCTTCTGGTACTGCACCAG |
| N_H03.ab1 | STAESPGPGSTSSTAE | GTTCTACCAGCTCTACTGCTGAATCTCCGGGCCCAGG |
| | SPGP | TTCCACCAGCTCTACCGCAGAATCTCCTGGTCCA |
| LCW0403_035_GFP- | GSTSSTAESPGPGSTS | GGTTCCACCAGCTCTACCGCTGAATCTCCGGGCCCA |
| N_A04.ab1 | ESPSGTAPGSTSSTAE | GGTTCTACCAGCGAATCCCCTTCTGGCACTGCACCA |
| | SPGP | GGTTCTACTAGCTCTACCGCAGAATCTCCGGGCCCA |
| LCW0403_036_GFP- | GSTSSTAESPGPGTSP | GGTTCTACCAGCTCTACTGCTGAATCTCCGGGTCCAG |
| N_B04.ab1 | SGESSTAPGTSTPESG | GTACTTCCCCGAGCGGTGAATCTTCTACTGCACCAG |
| | SASP | GTACTTCTACTCCGGAAAGCGGTTCCGCTTCTCCA |
| LCW0403_039_GFP- | GSTSESPSGTAPGSTS | GGTTCTACCAGCGAATCTCCTTCTGGCACCGCTCCAG |
| N_C04.ab1 | ESPSGTAPGTSPSGES | GTTCTACTAGCGAATCCCCGTCTGGTACCGCACCAG |
| | STAP | GTACTTCTCCTAGCGGCGAATCTTCTACCGCACCA |
| LCW0403_041_GFP- | GSTSESPSGTAPGSTS | GGTTCTACCAGCGAATCCCCTTCTGGTACTGCTCCAG |
| N_D04.ab1 | ESPSGTAPGTSTPESG | GTTCTACCAGCGAATCCCCTTCTGGCACCGCACCAG |
| | SASP | GTACTTCTACCCCTGAAAGCGGCTCCGCTTCTCCA |
| LCW0403_044_GFP- | GTSTPESGSASPGSTS | GGTACCTCTACTCCTGAAAGCGGTTCTGCATCTCCAG |
| N_E04.ab1 | STAESPGPGSTSSTAE | GTTCCACTAGCTCTACCGCAGAATCTCCGGGCCCAG |
| | SPGP | GTTCTACTAGCTCTACTGCTGAATCTCCTGGCCCA |
| LCW0403_046_GFP- | GSTSESPSGTAPGSTS | GGTTCTACCAGCGAATCCCCTTCTGGCACTGCACCA |
| N_F04.ab1 | ESPSGTAPGTSPSGES | GGTTCTACTAGCGAATCCCCTTCTGGTACCGCACCAG |
| | STAP | GTACTTCTCCGAGCGGCGAATCTTCTACTGCTCCA |
| LCW0403_047_GFP- | GSTSSTAESPGPGSTS | GGTTCTACTAGCTCTACCGCTGAATCTCCTGGCCCAG |
| N_G04.ab1 | STAESPGPGSTSESPS | GTTCCACTAGCTCTACCGCAGAATCTCCGGGCCCAG |
| | GTAP | GTTCTACTAGCGAATCCCCTTCTGGTACCGCTCCA |
| LCW0403_049_GFP- | GSTSSTAESPGPGSTS | GGTTCCACCAGCTCTACTGCAGAATCTCCTGGCCCA |
| N_H04.ab1 | STAESPGPGTSTPESG | GGTTCTACTAGCTCTACCGCAGAATCTCCTGGTCCAG |
| | SASP | GTACCTCTACTCCTGAAAGCGGTTCCGCATCTCCA |
| LCW0403_051_GFP- | GSTSSTAESPGPGSTS | GGTTCTACTAGCTCTACTGCTGAATCTCCGGGCCCAG |
| N_A05.ab1 | STAESPGPGSTSESPS | GTTCTACTAGCTCTACCGCTGAATCTCCGGGTCCAGG |
| | GTAP | TTCTACTAGCGAATCTCCTTCTGGTACCGCTCCA |
| LCW0403_053_GFP- | GTSPSGESSTAPGSTS | GGTACCTCCCCGAGCGGTGAATCTTCTACTGCACCA |
| N_B05.ab1 | ESPSGTAPGSTSSTAE | GGTTCTACTAGCGAATCCCCTTCTGGTACTGCTCCAG |
| | SPGP | GTTCCACCAGCTCTACTGCAGAATCTCCGGGTCCA |
| LCW0403_054_GFP- | GSTSESPSGTAPGTSP | GGTTCTACTAGCGAATCCCCGTCTGGTACTGCTCCAG |
| N_C05.ab1 | SGESSTAPGSTSSTAE | GTACTTCCCCTAGCGGTGAATCTTCTACTGCTCCAGG |
| | SPGP | TTCTACCAGCTCTACCGCAGAATCTCCGGGTCCA |
| LCW0403_057_GFP- | GSTSSTAESPGPGSTS | GGTTCTACCAGCTCTACCGCTGAATCTCCTGGCCCAG |
| N_D05.ab1 | ESPSGTAPGTSPSGES | GTTCTACTAGCGAATCTCCGTCTGGCACCGCACCAG |
| | STAP | GTACTTCCCCTAGCGGTGAATCTTCTACTGCACCA |
| LCW0403_058_GFP- | GSTSESPSGTAPGSTS | GGTTCTACTAGCGAATCTCCTTCTGGCACTGCACCAG |
| N_E05.ab1 | ESPSGTAPGTSTPESG | GTTCTACCAGCGAATCTCCGTCTGGCACTGCACCAG |
| | SASP | GTACCTCTACCCCTGAAAGCGGTTCCGCTTCTCCA |
| LCW0403_060_GFP- | GTSTPESGSASPGSTS | GGTACCTCTACTCCGGAAAGCGGTTCCGCATCTCCA |
| N_F05.ab1 | ESPSGTAPGSTSSTAE | GGTTCTACCAGCGAATCCCCGTCTGGCACCGCACCA |
| | SPGP | GGTTCTACTAGCTCTACTGCTGAATCTCCGGGCCCA |
| LCW0403_063_GFP- | GSTSSTAESPGPGTSP | GGTTCTACTAGCTCTACTGCAGAATCTCCGGGCCCA |
| N_G05.ab1 | SGESSTAPGTSPSGES | GGTACCTCTCCTAGCGGTGAATCTTCTACCGCTCCAG |
| | STAP | GTACTTCTCCGAGCGGTGAATCTTCTACCGCTCCA |
| LCW0403_064_GFP- | GTSPSGESSTAPGTSP | GGTACCTCCCCTAGCGGCGAATCTTCTACTGCTCCAG |
| N_H05.ab1 | SGESSTAPGTSPSGES | GTACCTCTCCTAGCGGCGAATCTTCTACCGCTCCAGG |
| | STAP | TACCTCCCCTAGCGGTGAATCTTCTACCGCACCA |
| LCW0403_065_GFP- | GSTSSTAESPGPGTST | GGTTCCACTAGCTCTACTGCTGAATCTCCTGGCCCAG |
| N_A06.ab1 | PESGSASPGSTSESPS | GTACTTCTACTCCGGAAAGCGGTTCCGCTTCTCCAGG |
| | GTAP | TTCTACTAGCGAATCTCCGTCTGGCACCGCACCA |
| LCW0403_066_GFP- | GSTSESPSGTAPGTSP | GGTTCTACTAGCGAATCTCCGTCTGGCACTGCTCCAG |
| N_B06.ab1 | SGESSTAPGTSPSGES | GTACTTCTCCTAGCGGTGAATCTTCTACCGCTCCAGG |
| | STAP | TACTTCCCCTAGCGGCGAATCTTCTACCGCTCCA |
| LCW0403_067_GFP- | GSTSESPSGTAPGTST | GGTTCTACTAGCGAATCTCCTTCTGGTACCGCTCCAG |
| N_C06.ab1 | PESGSASPGSTSSTAE | GTACTTCTACCCCTGAAAGCGGCTCCGCTTCTCCAGG |
| | SPGP | TTCCACTAGCTCTACCGCTGAATCTCCGGGTCCA |
| LCW0403_068_GFP- | GSTSSTAESPGPGSTS | GGTTCCACTAGCTCTACTGCTGAATCTCCTGGCCCAG |
| N_D06.ab1 | STAESPGPGSTSESPS | GTTCTACCAGCTCTACCGCTGAATCTCCTGGCCCAGG |
| | GTAP | TTCTACCAGCGAATCTCCGTCTGGCACCGCACCA |
| LCW0403_069_GFP- | GSTSESPSGTAPGTST | GGTTCTACTAGCGAATCCCCGTCTGGTACCGCACCA |
| N_E06.ab1 | PESGSASPGTSTPESG | GGTACTTCTACCCCGGAAAGCGGCTCTGCTTCTCCAG |
| | SASP | GTACTTCTACCCCGGAAAGCGGCTCCGCATCTCCA |
| LCW0403_070_GFP- | GSTSESPSGTAPGTST | GGTTCTACTAGCGAATCCCCGTCTGGTACTGCTCCAG |
| N_F06.ab1 | PESGSASPGTSTPESG | GTACTTCTACTCCTGAAAGCGGTTCCGCTTCTCCAGG |
| | SASP | TACCTCTACTCCGGAAAGCGGTTCTGCATCTCCA |

### Example 4

### Construction of XTEN_AG36 Segments

[0531] A codon library encoding sequences of 36 amino acid length was constructed. The sequences were designated XTEN_AG36. Its segments have the amino acid sequence [α]₃ where X is a 12 mer peptide with the sequence: GTPGSGTASSSP, GSSTPSGATGSP, GSSPSASTGTGP, or GASPGTSSTGSP. The insert was obtained by annealing the following pairs of phosphorylated synthetic oligonucleotide pairs:

AG1for: AGGTACYCCKGGYAGCGGTACYGCWTCTTCYTCTCC
AG1rev: ACCTGGAGARGAAGAWGCRGTACCGCTRCCMGGRGT
AG2for: AGGTAGCTCTACYCCKTCTGGTGCWACYGGYTCYCC
AG2rev: ACCTGGRGARCCRGTWGCACCAGAMGGRGTAGAGCT
AG3for: AGGTTCTAGCCCKTCTGCWTCYACYGGTACYGGYCC
AG3rev: ACCTGGRCCRGTACCRGTRGAWGCAGAMGGGCTAGA
AG4for: AGGTGCWTCYCCKGGYACYAGCTCTACYGGTTCTCC
AG4rev: ACCTGGAGAACCRGTAGAGCTRGTRCCMGGRGAWGC

[0532] We also annealed the phosphorylated oligonucleotide “3KpnIstopperFor”: AGGTTCGTCTTCACTCGAGGGTAC and the non-phosphorylated oligonucleotide “pr_{—}3KpnIstopperRev”: CCTCGAGTGAAGACGA. The annealed oligonucleotide pairs were ligated, which resulted in a mixture of products with varying length that represents the varying number of 12 mer repeats ligated to one BbsI/KpnI segment. The products corresponding to the length of 36 amino acids were isolated from the mixture by preparative agarose gel electrophoresis and ligated into the BsaI/KpnI digested stuffer vector pCW0359. Most of the clones in the resulting library designated LCW0404 showed green fluorescence after induction which shows that the sequence of XTEN_AG36 had been ligated in frame with the GFP gene and most sequences of XTEN_AG36 show good expression.

[0533] We screened 96 isolates from library LCW0404 for high level of fluorescence by stamping them onto agar plate containing IPTG. The same isolates were evaluated by PCR and 48 isolates were identified that contained segments with 36 amino acids as well as strong fluorescence. These isolates were sequenced and 44 clones were identified that contained correct XTEN_AG36 segments. The file names of the nucleotide and amino acid constructs for these segments are listed in Table 12.

TABLE 12
DNA and Amino Acid Sequences for 36-mer motifs

| | | |
|---|---|---|
| File name | Amino acid sequence | Nucleotide sequence |

| | | |
|---|---|---|
| LCW0404_001_GFP- | GASPGTSSTGSPGTPG | GGTGCATCCCCGGGCACTAGCTCTACCGGTTCTCCA |
| N_A07.ab1 | SGTASSSPGSSTPSGA | GGTACTCCTGGTAGCGGTACTGCTTCTTCTTCTCCAG |
| | TGSP | GTAGCTCTACTCCTTCTGGTGCTACTGGTTCTCCA |
| LCW0404_003_GFP- | GSSTPSGATGSPGSSP | GGTAGCTCTACCCCTTCTGGTGCTACCGGCTCTCCAG |
| N_B07.ab1 | SASTGTGPGSSTPSGA | GTTCTAGCCCGTCTGCTTCTACCGGTACCGGTCCAGG |
| | TGSP | TAGCTCTACCCCTTCTGGTGCTACTGGTTCTCCA |
| LCW0404_006_GFP- | GASPGTSSTGSPGSSP | GGTGCATCTCCGGGTACTAGCTCTACCGGTTCTCCAG |
| N_C07.ab1 | SASTGTGPGSSTPSGA | GTTCTAGCCCTTCTGCTTCCACTGGTACCGGCCCAGG |
| | TGSP | TAGCTCTACCCCGTCTGGTGCTACTGGTTCCCCA |
| LCW0404_007_GFP- | GTPGSGTASSSPGSST | GGTACTCCGGGCAGCGGTACTGCTTCTTCCTCTCCAG |
| N_D07.ab1 | PSGATGSPGASPGTSS | GTAGCTCTACCCCTTCTGGTGCAACTGGTTCCCCAGG |
| | TGSP | TGCATCCCCTGGTACTAGCTCTACCGGTTCTCCA |
| LCW0404_009_GFP- | GTPGSGTASSSPGASP | GGTACCCCTGGCAGCGGTACTGCTTCTTCTTCTCCAG |
| N_E07.ab1 | GTSSTGSPGSRPSAST | GTGCTTCCCCTGGTACCAGCTCTACCGGTTCTCCAGG |
| | GTGP | TTCTAGACCTTCTGCATCCACCGGTACTGGTCCA |
| LCW0404_011_GFP- | GASPGTSSTGSPGSST | GGTGCATCTCCTGGTACCAGCTCTACCGGTTCTCCAG |
| N_F07.ab1 | PSGATGSPGASPGTSS | GTAGCTCTACTCCTTCTGGTGCTACTGGCTCTCCAGG |
| | TGSP | TGCTTCCCCGGGTACCAGCTCTACCGGTTCTCCA |
| LCW0404_012_GFP- | GTPGSGTASSSPGSST | GGTACCCCGGGCAGCGGTACCGCATCTTCCTCTCCA |
| N_G07.ab1 | PSGATGSPGSSTPSGA | GGTAGCTCTACCCCGTCTGGTGCTACCGGTTCCCCAG |
| | TGSP | GTAGCTCTACCCCGTCTGGTGCAACCGGCTCCCCA |
| LCW0404_014_GFP- | GASPGTSSTGSPGASP | GGTGCATCTCCGGGCACTAGCTCTACTGGTTCTCCAG |
| N_H07.ab1 | GTSSTGSPGASPGTSS | GTGCATCCCCTGGCACTAGCTCTACTGGTTCTCCAGG |
| | TGSP | TGCTTCTCCTGGTACCAGCTCTACTGGTTCTCCA |
| LCW0404_015_GFP- | GSSTPSGATGSPGSSP | GGTAGCTCTACTCCGTCTGGTGCAACCGGCTCCCCA |
| N_A08.ab1 | SASTGTGPGASPGTSS | GGTTCTAGCCCGTCTGCTTCCACTGGTACTGGCCCAG |
| | TGSP | GTGCTTCCCCGGGCACCAGCTCTACTGGTTCTCCA |
| LCW0404_016_GFP- | GSSTPSGATGSPGSST | GGTAGCTCTACTCCTTCTGGTGCTACCGGTTCCCCAG |
| N_B08.ab1 | PSGATGSPGTPGSGT | GTAGCTCTACTCCTTCTGGTGCTACTGGTTCCCCAGG |
| | ASSSP | TACTCCGGGCAGCGGTACTGCTTCTTCCTCTCCA |
| LCW0404_017_GFP- | GSSTPSGATGSPGSST | GGTAGCTCTACTCCGTCTGGTGCAACCGGTTCCCCAG |
| N_C08.ab1 | PSGATGSPGASPGTSS | GTAGCTCTACTCCTTCTGGTGCTACTGGCTCCCCAGG |
| | TGSP | TGCATCCCCTGGCACCAGCTCTACCGGTTCTCCA |
| LCW0404_018_GFP- | GTPGSGTASSSPGSSP | GGTACTCCTGGTAGCGGTACCGCATCTTCCTCTCCAG |
| N_D08.ab1 | SASTGTGPGSSTPSGA | GTTCTAGCCCTTCTGCATCTACCGGTACCGGTCCAGG |
| | TGSP | TAGCTCTACTCCTTCTGGTGCTACTGGCTCTCCA |
| LCW0404_023_GFP- | GASPGTSSTGSPGSSP | GGTGCTTCCCCGGGCACTAGCTCTACCGGTTCTCCAG |
| N_F08.ab1 | SASTGTGPGTPGSGT | GTTCTAGCCCTTCTGCATCTACTGGTACTGGCCCAGG |
| | ASSSP | TACTCCGGGCAGCGGTACTGCTTCTTCCTCTCCA |
| LCW0404_025_GFP- | GSSTPSGATGSPGSST | GGTAGCTCTACTCCGTCTGGTGCTACCGGCTCTCCAG |
| N_G08.ab1 | PSGATGSPGASPGTSS | GTAGCTCTACCCCTTCTGGTGCAACCGGCTCCCCAGG |
| | TGSP | TGCTTCTCCGGGTACCAGCTCTACTGGTTCTCCA |
| LCW0404_029_GFP- | GTPGSGTASSSPGSST | GGTACCCCTGGCAGCGGTACCGCTTCTTCCTCTCCAG |
| N_A09.ab1 | PSGATGSPGSSPSAST | GTAGCTCTACCCCGTCTGGTGCTACTGGCTCTCCAGG |
| | GTGP | TTCTAGCCCGTCTGCATCTACCGGTACCGGCCCA |
| LCW0404_030_GFP- | GSSTPSGATGSPGTPG | GGTAGCTCTACTCCTTCTGGTGCAACCGGCTCCCCAG |
| N_B09.ab1 | SGTASSSPGTPGSGTA | GTACCCCGGGCAGCGGTACCGCATCTTCCTCTCCAG |
| | SSSP | GTACTCCGGGTAGCGGTACTGCTTCTTCTTCTCCA |
| LCW0404_031_GFP- | GTPGSGTASSSPGSST | GGTACCCCGGGTAGCGGTACTGCTTCTTCCTCTCCAG |
| N_C09.ab1 | PSGATGSPGASPGTSS | GTAGCTCTACCCCTTCTGGTGCAACCGGCTCTCCAGG |
| | TGSP | TGCTTCTCCGGGCACCAGCTCTACCGGTTCTCCA |
| LCW0404_034_GFP- | GSSTPSGATGSPGSST | GGTAGCTCTACCCCGTCTGGTGCTACCGGCTCTCCAG |
| N_D09.ab1 | PSGATGSPGASPGTSS | GTAGCTCTACCCCGTCTGGTGCAACCGGCTCCCCAG |
| | TGSP | GTGCATCCCCGGGTACTAGCTCTACCGGTTCTCCA |
| LCW0404_035_GFP- | GASPGTSSTGSPGTPG | GGTGCTTCTCCGGGCACCAGCTCTACTGGTTCTCCAG |
| N_E09.ab1 | SGTASSSPGSSTPSGA | GTACCCCGGGCAGCGGTACCGCATCTTCTTCTCCAG |
| | TGSP | GTAGCTCTACTCCTTCTGGTGCAACTGGTTCTCCA |
| LCW0404_036_GFP- | GSSPSASTGTGPGSST | GGTTCTAGCCCGTCTGCTTCCACCGGTACTGGCCCAG |
| N_F09.ab1 | PSGATGSPGTPGSGT | GTAGCTCTACCCCGTCTGGTGCAACTGGTTCCCCAGG |
| | ASSSP | TACCCCTGGTAGCGGTACCGCTTCTTCTTCTCCA |
| LCW0404_037_GFP- | GASPGTSSTGSPGSSP | GGTGCTTCTCCGGGCACCAGCTCTACTGGTTCTCCAG |
| N_G09.ab1 | SASTGTGPGSSTPSGA | GTTCTAGCCCTTCTGCATCCACCGGTACCGGTCCAGG |
| | TGSP | TAGCTCTACCCCTTCTGGTGCAACCGGCTCTCCA |
| LCW0404_040_GFP- | GASPGTSSTGSPGSST | GGTGCATCCCCGGGCACCAGCTCTACCGGTTCTCCA |
| N_H09.ab1 | PSGATGSPGSSTPSGA | GGTAGCTCTACCCCGTCTGGTGCTACCGGCTCTCCAG |
| | TGSP | GTAGCTCTACCCCGTCTGGTGCTACTGGCTCTCCA |
| LCW0404_041_GFP- | GTPGSGTASSSPGSST | GGTACCCCTGGTAGCGGTACTGCTTCTTCCTCTCCAG |
| N_A10.ab1 | PSGATGSPGTPGSGT | GTAGCTCTACTCCGTCTGGTGCTACCGGTTCTCCAGG |
| | ASSSP | TACCCCGGGTAGCGGTACCGCATCTTCTTCTCCA |
| LCW0404_043_GFP- | GSSPSASTGTGPGSST | GGTTCTAGCCCTTCTGCTTCCACCGGTACTGGCCCAG |
| N_C10.ab1 | PSGATGSPGSSTPSGA | GTAGCTCTACCCCTTCTGGTGCTACCGGCTCCCCAGG |
| | TGSP | TAGCTCTACTCCTTCTGGTGCAACTGGCTCTCCA |
| LCW0404_045_GFP- | GASPGTSSTGSPGSSP | GGTGCTTCTCCTGGCACCAGCTCTACTGGTTCTCCAG |
| N_D10.ab1 | SASTGTGPGSSPSAST | GTTCTAGCCCTTCTGCTTCTACCGGTACTGGTCCAGG |
| | GTGP | TTCTAGCCCTTCTGCATCCACTGGTACTGGTCCA |
| LCW0404_047_GFP- | GTPGSGTASSSPGASP | GGTACTCCTGGCAGCGGTACCGCTTCTTCTTCTCCAG |
| N_F10.ab1 | GTSSTGSPGASPGTSS | GTGCTTCTCCTGGTACTAGCTCTACTGGTTCTCCAGG |
| | TGSP | TGCTTCTCCGGGCACTAGCTCTACTGGTTCTCCA |
| LCW0404_048_GFP- | GSSTPSGATGSPGASP | GGTAGCTCTACCCCGTCTGGTGCTACCGGTTCCCCAG |
| N_G10.ab1 | GTSSTGSPGSSTPSGA | GTGCTTCTCCTGGTACTAGCTCTACCGGTTCTCCAGG |
| | TGSP | TAGCTCTACCCCGTCTGGTGCTACTGGCTCTCCA |
| LCW0404_049_GFP- | GSSTPSGATGSPGTPG | GGTAGCTCTACCCCGTCTGGTGCTACTGGTTCTCCAG |
| N_H10.ab1 | SGTASSSPGSSTPSGA | GTACTCCGGGCAGCGGTACTGCTTCTTCCTCTCCAGG |
| | TGSP | TAGCTCTACCCCTTCTGGTGCTACTGGCTCTCCA |
| LCW0404_050_GFP- | GASPGTSSTGSPGSSP | GGTGCATCTCCTGGTACCAGCTCTACTGGTTCTCCAG |
| N_A11.ab1 | SASTGTGPGSSTPSGA | GTTCTAGCCCTTCTGCTTCTACCGGTACCGGTCCAGG |
| | TGSP | TAGCTCTACTCCTTCTGGTGCTACCGGTTCTCCA |
| LCW0404_051_GFP- | GSSTPSGATGSPGSST | GGTAGCTCTACCCCGTCTGGTGCTACTGGCTCTCCAG |
| N_B11.ab1 | PSGATGSPGSSTPSGA | GTAGCTCTACTCCTTCTGGTGCTACTGGTTCCCCAGG |
| | TGSP | TAGCTCTACCCCGTCTGGTGCAACTGGCTCTCCA |
| LCW0404_052_GFP- | GASPGTSSTGSPGTPG | GGTGCATCCCCGGGTACCAGCTCTACCGGTTCTCCA |
| N_C11.ab1 | SGTASSSPGASPGTSS | GGTACTCCTGGCAGCGGTACTGCATCTTCCTCTCCAG |
| | TGSP | GTGCTTCTCCGGGCACCAGCTCTACTGGTTCTCCA |
| LCW0404_053_GFP- | GSSTPSGATGSPGSSP | GGTAGCTCTACTCCTTCTGGTGCAACTGGTTCTCCAG |
| N_D11.ab1 | SASTGTGPGASPGTSS | GTTCTAGCCCGTCTGCATCCACTGGTACCGGTCCAGG |
| | TGSP | TGCTTCCCCTGGCACCAGCTCTACCGGTTCTCCA |
| LCW0404_057_GFP- | GASPGTSSTGSPGSST | GGTGCATCTCCTGGTACTAGCTCTACTGGTTCTCCAG |
| N_E11.ab1 | PSGATGSPGSSPSAST | GTAGCTCTACTCCGTCTGGTGCAACCGGCTCTCCAGG |
| | GTGP | TTCTAGCCCTTCTGCATCTACCGGTACTGGTCCA |
| LCW0404_060_GFP- | GTPGSGTASSSPGSST | GGTACTCCTGGCAGCGGTACCGCATCTTCCTCTCCAG |
| N_F11.ab1 | PSGATGSPGASPGTSS | GTAGCTCTACTCCGTCTGGTGCAACTGGTTCCCCAGG |
| | TGSP | TGCTTCTCCGGGTACCAGCTCTACCGGTTCTCCA |
| LCW0404_062_GFP- | GSSTPSGATGSPGTPG | GGTAGCTCTACCCCGTCTGGTGCAACCGGCTCCCCA |
| N_G11.ab1 | SGTASSSPGSSTPSGA | GGTACTCCTGGTAGCGGTACCGCTTCTTCTTCTCCAG |
| | TGSP | GTAGCTCTACTCCGTCTGGTGCTACCGGCTCCCCA |
| LCW0404_066_GFP- | GSSPSASTGTGPGSSP | GGTTCTAGCCCTTCTGCATCCACCGGTACCGGCCCAG |
| N_H11.ab1 | SASTGTGPGASPGTSS | GTTCTAGCCCGTCTGCTTCTACCGGTACTGGTCCAGG |
| | TGSP | TGCTTCTCCGGGTACTAGCTCTACTGGTTCTCCA |
| LCW0404_067_GFP- | GTPGSGTASSSPGSST | GGTACCCCGGGTAGCGGTACCGCTTCTTCTTCTCCAG |
| N_A12.ab1 | PSGATGSPGSNPSAST | GTAGCTCTACTCCGTCTGGTGCTACCGGCTCTCCAGG |
| | GTGP | TTCTAACCCTTCTGCATCCACCGGTACCGGCCCA |
| LCW0404_068_GFP- | GSSPSASTGTGPGSST | GGTTCTAGCCCTTCTGCATCTACTGGTACTGGCCCAG |
| N_B12.ab1 | PSGATGSPGASPGTSS | GTAGCTCTACTCCTTCTGGTGCTACCGGCTCTCCAGG |
| | TGSP | TGCTTCTCCGGGTACTAGCTCTACCGGTTCTCCA |
| LCW0404_069_GFP- | GSSTPSGATGSPGASP | GGTAGCTCTACCCCTTCTGGTGCAACCGGCTCTCCAG |
| N_C12.ab1 | GTSSTGSPGTPGSGTA | GTGCATCCCCGGGTACCAGCTCTACCGGTTCTCCAG |
| | SSSP | GTACTCCGGGTAGCGGTACCGCTTCTTCCTCTCCA |
| LCW0404_070_GFP- | GSSTPSGATGSPGSST | GGTAGCTCTACTCCGTCTGGTGCAACCGGTTCCCCAG |
| N_D12.ab1 | PSGATGSPGSSTPSGA | GTAGCTCTACCCCTTCTGGTGCAACCGGCTCCCCAGG |
| | TGSP | TAGCTCTACCCCTTCTGGTGCAACTGGCTCTCCA |
| LCW0404_073_GFP- | GASPGTSSTGSPGTPG | GGTGCTTCTCCTGGCACTAGCTCTACCGGTTCTCCAG |
| N_E12.ab1 | SGTASSSPGSSTPSGA | GTACCCCTGGTAGCGGTACCGCATCTTCCTCTCCAGG |
| | TGSP | TAGCTCTACTCCTTCTGGTGCTACTGGTTCCCCA |
| LCW0404_075_GFP- | GSSTPSGATGSPGSSP | GGTAGCTCTACCCCGTCTGGTGCTACTGGCTCCCCAG |
| N_F12.ab1 | SASTGTGPGSSPSAST | GTTCTAGCCCTTCTGCATCCACCGGTACCGGTCCAGG |
| | GTGP | TTCTAGCCCGTCTGCATCTACTGGTACTGGTCCA |
| LCW0404_080_GFP- | GASPGTSSTGSPGSSP | GGTGCTTCCCCGGGCACCAGCTCTACTGGTTCTCCAG |
| N_G12.ab1 | SASTGTGPGSSPSAST | GTTCTAGCCCGTCTGCTTCTACTGGTACTGGTCCAGG |
| | GTGP | TTCTAGCCCTTCTGCTTCCACTGGTACTGGTCCA |
| LCW0404_081_GFP- | GASPGTSSTGSPGSSP | GGTGCTTCCCCGGGTACCAGCTCTACCGGTTCTCCAG |
| N_H12.ab1 | SASTGTGPGTPGSGT | GTTCTAGCCCTTCTGCTTCTACCGGTACCGGTCCAGG |
| | ASSSP | TACCCCTGGCAGCGGTACCGCATCTTCCTCTCCA |

### Example 5

### Construction of XTEN_AE864

[0534] XTEN_AE864 was constructed from serial dimerization of XTEN_AE36 to AE72, 144, 288, 576 and 864. A collection of XTEN_AE72 segments was constructed from 37 different segments of XTEN_AE36. Cultures of E. coli harboring all 37 different 36-amino acid segments were mixed and plasmids were isolated. This plasmid pool was digested with BsaI/NcoI to generate the small fragment as the insert. The same plasmid pool was digested with BbsI/NcoI to generate the large fragment as the vector. The insert and vector fragments were ligated resulting in a doubling of the length and the ligation mixture was transformed into BL21Gold(DE3) cells to obtain colonies of XTEN_AE72.

[0535] This library of XTEN_AE72 segments was designated LCW0406. All clones from LCW0406 were combined and dimerized again using the same process as described above yielding library LCW0410 of XTEN_AE144. All clones from LCW0410 were combined and dimerized again using the same process as described above yielding library LCW0414 of XTEN_AE288. Two isolates LCW0414.001 and LCW0414.002 were randomly picked from the library and sequenced to verify the identities. All clones from LCW0414 were combined and dimerized again using the same process as described above yielding library LCW0418 of XTEN_AE576. We screened 96 isolates from library LCW0418 for high level of GFP fluorescence. 8 isolates with right sizes of inserts by PCR and strong fluorescence were sequenced and 2 isolates (LCW0418.018 and LCW0418.052) were chosen for future use based on sequencing and expression data.

[0536] The specific clone pCW0432 of XTEN_AE864 was constructed by combining LCW0418.018 of XTEN_AE576 and LCW0414.002 of XTEN_AE288 using the same dimerization process as described above.

### Example 6

### Construction of XTEN_AM144

[0537] A collection of XTEN_AM144 segments was constructed starting from 37 different segments of XTEN_AE36, 44 segments of XTEN_AF36, and 44 segments of XTEN_AG36.

[0538] Cultures of E. coli harboring all 125 different 36-amino acid segments were mixed and plasmids were isolated. This plasmid pool was digested with BsaI/NcoI to generate the small fragment as the insert. The same plasmid pool was digested with BbsI/NcoI to generate the large fragment as the vector. The insert and vector fragments were ligated resulting in a doubling of the length and the ligation mixture was transformed into BL21Gold(DE3) cells to obtain colonies of XTEN_AM72.

[0539] This library of XTEN_AM72 segments was designated LCW0461. All clones from LCW0461 were combined and dimerized again using the same process as described above yielding library LCW0462. 1512 Isolates from library LCW0462 were screened for protein expression. Individual colonies were transferred into 96 well plates and cultured overnight as starter cultures. These starter cultures were diluted into fresh autoinduction medium and cultured for 20-30 h. Expression was measured using a fluorescence plate reader with excitation at 395 nm and emission at 510 nm 192 isolates showed high level expression and were submitted to DNA sequencing. Most clones in library LCW0462 showed good expression and similar physicochemical properties suggesting that most combinations of XTEN_AM36 segments yield useful XTEN sequences. 30 isolates from LCW0462 were chosen as a preferred collection of XTEN_AM144 segments for the construction of multifunctional proteins that contain multiple XTEN segments. The file names of the nucleotide and amino acid constructs for these segments are listed in Table 13.

TABLE 13
DNA and amino acid sequences for AM144 segments

| | | |
|---|---|---|
| Clone | DNA Sequence | Protein Sequence |

| | | |
|---|---|---|
| LCW462_r1 | GGTACCCCGGGCAGCGGTACCGCATCTTCCTCTCCAGGTA | GTPGSGTASSSPGSST |
| | GCTCTACCCCGTCTGGTGCTACCGGTTCCCCAGGTAGCTC | PSGATGSPGSSTPSGA |
| | TACCCCGTCTGGTGCAACCGGCTCCCCAGGTAGCCCGGCT | TGSPGSPAGSPTSTEE |
| | GGCTCTCCTACCTCTACTGAGGAAGGTACTTCTGAAAGCG | GTSESATPESGPGTST |
| | CTACTCCTGAGTCTGGTCCAGGTACCTCTACTGAACCGTC | EPSEGSAPGSSPSAST |
| | CGAAGGTAGCGCTCCAGGTTCTAGCCCTTCTGCATCCACC | GTGPGSSPSASTGTGP |
| | GGTACCGGCCCAGGTTCTAGCCCGTCTGCTTCTACCGGTA | GASPGTSSTGSPGTST |
| | CTGGTCCAGGTGCTTCTCCGGGTACTAGCTCTACTGGTTC | EPSEGSAPGTSTEPSE |
| | TCCAGGTACCTCTACCGAACCGTCCGAGGGTAGCGCACC | GSAPGSEPATSGSETP |
| | AGGTACCTCTACTGAACCGTCTGAGGGTAGCGCTCCAGG | |
| | TAGCGAACCGGCAACCTCCGGTTCTGAAACTCCA | |
| LCW462_r5 | GGTTCTACCAGCGAATCCCCTTCTGGCACTGCACCAGGTT | GSTSESPSGTAPGSTS |
| | CTACTAGCGAATCCCCTTCTGGTACCGCACCAGGTACTTC | ESPSGTAPGTSPSGES |
| | TCCGAGCGGCGAATCTTCTACTGCTCCAGGTACCTCTACT | STAPGTSTEPSEGSAP |
| | GAACCTTCCGAAGGCAGCGCTCCAGGTACCTCTACCGAA | GTSTEPSEGSAPGTSE |
| | CCGTCCGAGGGCAGCGCACCAGGTACTTCTGAAAGCGCA | SATPESGPGASPGTSS |
| | ACCCCTGAATCCGGTCCAGGTGCATCTCCTGGTACCAGCT | TGSPGSSTPSGATGSP |
| | CTACCGGTTCTCCAGGTAGCTCTACTCCTTCTGGTGCTAC | GASPGTSSTGSPGSTS |
| | TGGCTCTCCAGGTGCTTCCCCGGGTACCAGCTCTACCGGT | ESPSGTAPGSTSESPS |
| | TCTCCAGGTTCTACTAGCGAATCTCCTTCTGGCACTGCAC | GTAPGTSTPESGSASP |
| | CAGGTTCTACCAGCGAATCTCCGTCTGGCACTGCACCAGG | |
| | TACCTCTACCCCTGAAAGCGGTTCCGCTTCTCCA | |
| LCW462_r9 | GGTACTTCTACCGAACCTTCCGAGGGCAGCGCACCAGGT | GTSTEPSEGSAPGTSE |
| | ACTTCTGAAAGCGCTACCCCTGAGTCCGGCCCAGGTACTT | SATPESGPGTSESATP |
| | CTGAAAGCGCTACTCCTGAATCCGGTCCAGGTACCTCTAC | ESGPGTSTEPSEGSAP |
| | TGAACCTTCTGAGGGCAGCGCTCCAGGTACTTCTGAAAG | GTSESATPESGPGTST |
| | CGCTACCCCGGAGTCCGGTCCAGGTACTTCTACTGAACCG | EPSEGSAPGTSTEPSE |
| | TCCGAAGGTAGCGCACCAGGTACTTCTACTGAACCTTCCG | GSAPGSEPATSGSETP |
| | AAGGTAGCGCTCCAGGTAGCGAACCTGCTACTTCTGGTTC | GSPAGSPTSTEEGASP |
| | TGAAACCCCAGGTAGCCCGGCTGGCTCTCCGACCTCCACC | GTSSTGSPGSSPSAST |
| | GAGGAAGGTGCTTCTCCTGGCACCAGCTCTACTGGTTCTC | GTGPGSSPSASTGTGP |
| | CAGGTTCTAGCCCTTCTGCTTCTACCGGTACTGGTCCAGG | |
| | TTCTAGCCCTTCTGCATCCACTGGTACTGGTCCA | |
| LCW462_r10 | GGTAGCGAACCGGCAACCTCTGGCTCTGAAACCCCAGGT | GSEPATSGSETPGTSE |
| | ACCTCTGAAAGCGCTACTCCGGAATCTGGTCCAGGTACTT | SATPESGPGTSESATP |
| | CTGAAAGCGCTACTCCGGAATCCGGTCCAGGTTCTACCA | ESGPGSTSESPSGTAP |
| | GCGAATCTCCTTCTGGCACCGCTCCAGGTTCTACTAGCGA | GSTSESPSGTAPGTSP |
| | ATCCCCGTCTGGTACCGCACCAGGTACTTCTCCTAGCGGC | SGESSTAPGASPGTSS |
| | GAATCTTCTACCGCACCAGGTGCATCTCCGGGTACTAGCT | TGSPGSSPSASTGTGP |
| | CTACCGGTTCTCCAGGTTCTAGCCCTTCTGCTTCCACTGGT | GSSTPSGATGSPGSST |
| | ACCGGCCCAGGTAGCTCTACCCCGTCTGGTGCTACTGGTT | PSGATGSPGSSTPSGA |
| | CCCCAGGTAGCTCTACTCCGTCTGGTGCAACCGGTTCCCC | TGSPGASPGTSSTGSP |
| | AGGTAGCTCTACTCCTTCTGGTGCTACTGGCTCCCCAGGT | |
| | GCATCCCCTGGCACCAGCTCTACCGGTTCTCCA | |
| LCW462_r15 | GGTGCTTCTCCGGGCACCAGCTCTACTGGTTCTCCAGGTT | GASPGTSSTGSPGSSP |
| | CTAGCCCTTCTGCATCCACCGGTACCGGTCCAGGTAGCTC | SASTGTGPGSSTPSGA |
| | TACCCCTTCTGGTGCAACCGGCTCTCCAGGTACTTCTGAA | TGSPGTSESATPESGP |
| | AGCGCTACCCCGGAATCTGGCCCAGGTAGCGAACCGGCT | GSEPATSGSETPGSEP |
| | ACTTCTGGTTCTGAAACCCCAGGTAGCGAACCGGCTACCT | ATSGSETPGTSESATP |
| | CCGGTTCTGAAACTCCAGGTACTTCTGAAAGCGCTACTCC | ESGPGTSTEPSEGSAP |
| | GGAGTCCGGTCCAGGTACCTCTACCGAACCGTCCGAAGG | GTSTEPSEGSAPGTST |
| | CAGCGCTCCAGGTACTTCTACTGAACCTTCTGAGGGTAGC | EPSEGSAPGTSTEPSE |
| | GCTCCAGGTACCTCTACCGAACCGTCCGAGGGTAGCGCA | GSAPGSEPATSGSETP |
| | CCAGGTACCTCTACTGAACCGTCTGAGGGTAGCGCTCCA | |
| | GGTAGCGAACCGGCAACCTCCGGTTCTGAAACTCCA | |
| LCW462_r16 | GGTACCTCTACCGAACCTTCCGAAGGTAGCGCTCCAGGT | GTSTEPSEGSAPGSPA |
| | AGCCCGGCAGGTTCTCCTACTTCCACTGAGGAAGGTACTT | GSPTSTEEGTSTEPSE |
| | CTACCGAACCTTCTGAGGGTAGCGCACCAGGTACCTCTG | GSAPGTSESATPESGP |
| | AAAGCGCAACTCCTGAGTCTGGCCCAGGTAGCGAACCTG | GSEPATSGSETPGTSE |
| | CTACCTCCGGCTCTGAGACTCCAGGTACCTCTGAAAGCGC | SATPESGPGSPAGSPT |
| | AACCCCGGAATCTGGTCCAGGTAGCCCGGCTGGCTCTCCT | STEEGTSESATPESGP |
| | ACCTCTACTGAGGAAGGTACTTCTGAAAGCGCTACTCCTG | GTSTEPSEGSAPGSEP |
| | AGTCTGGTCCAGGTACCTCTACTGAACCGTCCGAAGGTA | ATSGSETPGTSTEPSE |
| | GCGCTCCAGGTAGCGAACCTGCTACTTCTGGTTCTGAAAC | GSAPGSEPATSGSETP |
| | TCCAGGTACTTCTACCGAACCGTCCGAGGGTAGCGCTCCA | |
| | GGTAGCGAACCTGCTACTTCTGGTTCTGAAACTCCA | |
| LCW462_r20 | GGTACTTCTACCGAACCGTCCGAAGGCAGCGCTCCAGGT | GTSTEPSEGSAPGTST |
| | ACCTCTACTGAACCTTCCGAGGGCAGCGCTCCAGGTACCT | EPSEGSAPGTSTEPSE |
| | CTACCGAACCTTCTGAAGGTAGCGCACCAGGTACTTCTAC | GSAPGTSTEPSEGSAP |
| | CGAACCGTCCGAAGGCAGCGCTCCAGGTACCTCTACTGA | GTSTEPSEGSAPGTST |
| | ACCTTCCGAGGGCAGCGCTCCAGGTACCTCTACCGAACCT | EPSEGSAPGTSTEPSE |
| | TCTGAAGGTAGCGCACCAGGTACTTCTACCGAACCTTCCG | GSAPGTSESATPESGP |
| | AGGGCAGCGCACCAGGTACTTCTGAAAGCGCTACCCCTG | GTSESATPESGPGTST |
| | AGTCCGGCCCAGGTACTTCTGAAAGCGCTACTCCTGAATC | EPSEGSAPGSEPATSG |
| | CGGTCCAGGTACTTCTACTGAACCTTCCGAAGGTAGCGCT | SETPGSPAGSPTSTEE |
| | CCAGGTAGCGAACCTGCTACTTCTGGTTCTGAAACCCCAG | |
| | GTAGCCCGGCTGGCTCTCCGACCTCCACCGAGGAA | |
| LCW462_r23 | GGTACTTCTACCGAACCGTCCGAGGGCAGCGCTCCAGGT | GTSTEPSEGSAPGTST |
| | ACTTCTACTGAACCTTCTGAAGGCAGCGCTCCAGGTACTT | EPSEGSAPGTSTEPSE |
| | CTACTGAACCTTCCGAAGGTAGCGCACCAGGTTCTACCA | GSAPGSTSESPSGTAP |
| | GCGAATCCCCTTCTGGTACTGCTCCAGGTTCTACCAGCGA | GSTSESPSGTAPGTST |
| | ATCCCCTTCTGGCACCGCACCAGGTACTTCTACCCCTGAA | PESGSASPGSEPATSG |
| | AGCGGCTCCGCTTCTCCAGGTAGCGAACCTGCAACCTCTG | SETPGTSESATPESGP |
| | GCTCTGAAACCCCAGGTACCTCTGAAAGCGCTACTCCTGA | GTSTEPSEGSAPGTST |
| | ATCTGGCCCAGGTACTTCTACTGAACCGTCCGAGGGCAG | EPSEGSAPGTSESATP |
| | CGCACCAGGTACTTCTACTGAACCGTCTGAAGGTAGCGC | ESGPGTSESATPESGP |
| | ACCAGGTACTTCTGAAAGCGCAACCCCGGAATCCGGCCC | |
| | AGGTACCTCTGAAAGCGCAACCCCGGAGTCCGGCCCA | |
| LCW462_r24 | GGTAGCTCTACCCCTTCTGGTGCTACCGGCTCTCCAGGTT | GSSTPSGATGSPGSSP |
| | CTAGCCCGTCTGCTTCTACCGGTACCGGTCCAGGTAGCTC | SASTGTGPGSSTPSGA |
| | TACCCCTTCTGGTGCTACTGGTTCTCCAGGTAGCCCTGCT | TGSPGSPAGSPTSTEE |
| | GGCTCTCCGACTTCTACTGAGGAAGGTAGCCCGGCTGGTT | GSPAGSPTSTEEGTST |
| | CTCCGACTTCTACTGAGGAAGGTACTTCTACCGAACCTTC | EPSEGSAPGASPGTSS |
| | CGAAGGTAGCGCTCCAGGTGCTTCCCCGGGCACTAGCTCT | TGSPGSSPSASTGTGP |
| | ACCGGTTCTCCAGGTTCTAGCCCTTCTGCATCTACTGGTA | GTPGSGTASSSPGSTS |
| | CTGGCCCAGGTACTCCGGGCAGCGGTACTGCTTCTTCCTC | STAESPGPGTSPSGES |
| | TCCAGGTTCTACTAGCTCTACTGCTGAATCTCCTGGCCCA | STAPGTSTPESGSASP |
| | GGTACTTCTCCTAGCGGTGAATCTTCTACCGCTCCAGGTA | |
| | CCTCTACTCCGGAAAGCGGTTCTGCATCTCCA | |
| LCW462_r27 | GGTACCTCTACTGAACCTTCTGAGGGCAGCGCTCCAGGTA | GTSTEPSEGSAPGTSE |
| | CTTCTGAAAGCGCTACCCCGGAGTCCGGTCCAGGTACTTC | SATPESGPGTSTEPSE |
| | TACTGAACCGTCCGAAGGTAGCGCACCAGGTACTTCTACT | GSAPGTSTEPSEGSAP |
| | GAACCGTCTGAAGGTAGCGCACCAGGTACTTCTGAAAGC | GTSESATPESGPGTSE |
| | GCAACCCCGGAATCCGGCCCAGGTACCTCTGAAAGCGCA | SATPESGPGTPGSGTA |
| | ACCCCGGAGTCCGGCCCAGGTACTCCTGGCAGCGGTACC | SSSPGASPGTSSTGSP |
| | GCTTCTTCTTCTCCAGGTGCTTCTCCTGGTACTAGCTCTAC | GASPGTSSTGSPGSPA |
| | TGGTTCTCCAGGTGCTTCTCCGGGCACTAGCTCTACTGGT | GSPTSTEEGSPAGSPT |
| | TCTCCAGGTAGCCCTGCTGGCTCTCCGACTTCTACTGAGG | STEEGTSTEPSEGSAP |
| | AAGGTAGCCCGGCTGGTTCTCCGACTTCTACTGAGGAAG | |
| | GTACTTCTACCGAACCTTCCGAAGGTAGCGCTCCA | |
| LCW462_r28 | GGTAGCCCAGCAGGCTCTCCGACTTCCACTGAGGAAGGT | GSPAGSPTSTEEGTST |
| | ACTTCTACTGAACCTTCCGAAGGCAGCGCACCAGGTACCT | EPSEGSAPGTSTEPSE |
| | CTACTGAACCTTCTGAGGGCAGCGCTCCAGGTACCTCTAC | GSAPGTSTEPSEGSAP |
| | CGAACCGTCTGAAGGTAGCGCACCAGGTACCTCTGAAAG | GTSESATPESGPGTSE |
| | CGCAACTCCTGAGTCCGGTCCAGGTACTTCTGAAAGCGC | SATPESGPGTPGSGTA |
| | AACCCCGGAGTCTGGCCCAGGTACCCCGGGTAGCGGTAC | SSSPGSSTPSGATGSP |
| | TGCTTCTTCCTCTCCAGGTAGCTCTACCCCTTCTGGTGCAA | GASPGTSSTGSPGTST |
| | CCGGCTCTCCAGGTGCTTCTCCGGGCACCAGCTCTACCGG | EPSEGSAPGTSESATP |
| | TTCTCCAGGTACCTCTACTGAACCTTCTGAGGGCAGCGCT | ESGPGTSTEPSEGSAP |
| | CCAGGTACTTCTGAAAGCGCTACCCCGGAGTCCGGTCCA | |
| | GGTACTTCTACTGAACCGTCCGAAGGTAGCGCACCA | |
| LCW462_r38 | GGTAGCGAACCGGCAACCTCCGGCTCTGAAACTCCAGGT | GSEPATSGSETPGTSE |
| | ACTTCTGAAAGCGCTACTCCGGAATCCGGCCCAGGTAGC | SATPESGPGSEPATSG |
| | GAACCGGCTACTTCCGGCTCTGAAACCCCAGGTAGCTCTA | SETPGSSTPSGATGSP |
| | CCCCGTCTGGTGCAACCGGCTCCCCAGGTACTCCTGGTAG | GTPGSGTASSSPGSST |
| | CGGTACCGCTTCTTCTTCTCCAGGTAGCTCTACTCCGTCTG | PSGATGSPGASPGTSS |
| | GTGCTACCGGCTCCCCAGGTGCATCTCCTGGTACCAGCTC | TGSPGSSTPSGATGSP |
| | TACCGGTTCTCCAGGTAGCTCTACTCCTTCTGGTGCTACT | GASPGTSSTGSPGSEP |
| | GGCTCTCCAGGTGCTTCCCCGGGTACCAGCTCTACCGGTT | ATSGSETPGTSTEPSE |
| | CTCCAGGTAGCGAACCTGCTACTTCTGGTTCTGAAACTCC | GSAPGSEPATSGSETP |
| | AGGTACTTCTACCGAACCGTCCGAGGGTAGCGCTCCAGG | |
| | TAGCGAACCTGCTACTTCTGGTTCTGAAACTCCA | |
| LCW462_r39 | GGTACCTCTACTGAACCTTCCGAAGGCAGCGCTCCAGGT | GTSTEPSEGSAPGTST |
| | ACCTCTACCGAACCGTCCGAGGGCAGCGCACCAGGTACT | EPSEGSAPGTSESATP |
| | TCTGAAAGCGCAACCCCTGAATCCGGTCCAGGTAGCCCT | ESGPGSPAGSPTSTEE |
| | GCTGGCTCTCCGACTTCTACTGAGGAAGGTAGCCCGGCTG | GSPAGSPTSTEEGTST |
| | GTTCTCCGACTTCTACTGAGGAAGGTACTTCTACCGAACC | EPSEGSAPGSPAGSPT |
| | TTCCGAAGGTAGCGCTCCAGGTAGCCCGGCTGGTTCTCCG | STEEGTSTEPSEGSAP |
| | ACTTCCACCGAGGAAGGTACCTCTACTGAACCTTCTGAGG | GTSTEPSEGSAPGASP |
| | GTAGCGCTCCAGGTACCTCTACTGAACCTTCCGAAGGCA | GTSSTGSPGSSPSAST |
| | GCGCTCCAGGTGCTTCCCCGGGCACCAGCTCTACTGGTTC | GTGPGSSPSASTGTGP |
| | TCCAGGTTCTAGCCCGTCTGCTTCTACTGGTACTGGTCCA | |
| | GGTTCTAGCCCTTCTGCTTCCACTGGTACTGGTCCA | |
| LCW462_r41 | GGTAGCTCTACCCCGTCTGGTGCTACCGGTTCCCCAGGTG | GSSTPSGATGSPGASP |
| | CTTCTCCTGGTACTAGCTCTACCGGTTCTCCAGGTAGCTC | GTSSTGSPGSSTPSGA |
| | TACCCCGTCTGGTGCTACTGGCTCTCCAGGTAGCCCTGCT | TGSPGSPAGSPTSTEE |
| | GGCTCTCCAACCTCCACCGAAGAAGGTACCTCTGAAAGC | GTSESATPESGPGSEP |
| | GCAACCCCTGAATCCGGCCCAGGTAGCGAACCGGCAACC | ATSGSETPGASPGTSS |
| | TCCGGTTCTGAAACCCCAGGTGCATCTCCTGGTACTAGCT | TGSPGSSTPSGATGSP |
| | CTACTGGTTCTCCAGGTAGCTCTACTCCGTCTGGTGCAAC | GSSPSASTGTGPGSTS |
| | CGGCTCTCCAGGTTCTAGCCCTTCTGCATCTACCGGTACT | ESPSGTAPGSTSESPS |
| | GGTCCAGGTTCTACCAGCGAATCCCCTTCTGGTACTGCTC | GTAPGTSTPESGSASP |
| | CAGGTTCTACCAGCGAATCCCCTTCTGGCACCGCACCAGG | |
| | TACTTCTACCCCTGAAAGCGGCTCCGCTTCTCCA | |
| LCW462_r42 | GGTTCTACCAGCGAATCTCCTTCTGGCACCGCTCCAGGTT | GSTSESPSGTAPGSTS |
| | CTACTAGCGAATCCCCGTCTGGTACCGCACCAGGTACTTC | ESPSGTAPGTSPSGES |
| | TCCTAGCGGCGAATCTTCTACCGCACCAGGTACCTCTGAA | STAPGTSESATPESGP |
| | AGCGCTACTCCGGAGTCTGGCCCAGGTACCTCTACTGAAC | GTSTEPSEGSAPGTST |
| | CGTCTGAGGGTAGCGCTCCAGGTACTTCTACTGAACCGTC | EPSEGSAPGTSTEPSE |
| | CGAAGGTAGCGCACCAGGTACCTCTACTGAACCTTCTGA | GSAPGTSESATPESGP |
| | GGGCAGCGCTCCAGGTACTTCTGAAAGCGCTACCCCGGA | GTSTEPSEGSAPGSST |
| | GTCCGGTCCAGGTACTTCTACTGAACCGTCCGAAGGTAGC | PSGATGSPGASPGTSS |
| | GCACCAGGTAGCTCTACCCCGTCTGGTGCTACCGGTTCCC | TGSPGSSTPSGATGSP |
| | CAGGTGCTTCTCCTGGTACTAGCTCTACCGGTTCTCCAGG | |
| | TAGCTCTACCCCGTCTGGTGCTACTGGCTCTCCA | |
| LCW462_r43 | GGTTCTACTAGCTCTACTGCAGAATCTCCGGGCCCAGGTA | GSTSSTAESPGPGTSP |
| | CCTCTCCTAGCGGTGAATCTTCTACCGCTCCAGGTACTTC | SGESSTAPGTSPSGES |
| | TCCGAGCGGTGAATCTTCTACCGCTCCAGGTTCTACTAGC | STAPGSTSSTAESPGP |
| | TCTACCGCTGAATCTCCGGGTCCAGGTTCTACCAGCTCTA | GSTSSTAESPGPGTST |
| | CTGCAGAATCTCCTGGCCCAGGTACTTCTACTCCGGAAAG | PESGSASPGTSPSGES |
| | CGGTTCCGCTTCTCCAGGTACTTCTCCTAGCGGTGAATCT | STAPGSTSSTAESPGP |
| | TCTACCGCTCCAGGTTCTACCAGCTCTACTGCTGAATCTC | GTSTPESGSASPGSTS |
| | CTGGCCCAGGTACTTCTACCCCGGAAAGCGGCTCCGCTTC | STAESPGPGSTSESPS |
| | TCCAGGTTCTACCAGCTCTACCGCTGAATCTCCTGGCCCA | GTAPGTSPSGESSTAP |
| | GGTTCTACTAGCGAATCTCCGTCTGGCACCGCACCAGGTA | |
| | CTTCCCCTAGCGGTGAATCTTCTACTGCACCA | |
| LCW462_r45 | GGTACCTCTACTCCGGAAAGCGGTTCCGCATCTCCAGGTT | GTSTPESGSASPGSTS |
| | CTACCAGCGAATCCCCGTCTGGCACCGCACCAGGTTCTAC | ESPSGTAPGSTSSTAE |
| | TAGCTCTACTGCTGAATCTCCGGGCCCAGGTACCTCTACT | SPGPGTSTEPSEGSAP |
| | GAACCTTCCGAAGGCAGCGCTCCAGGTACCTCTACCGAA | GTSTEPSEGSAPGTSE |
| | CCGTCCGAGGGCAGCGCACCAGGTACTTCTGAAAGCGCA | SATPESGPGTSESATP |
| | ACCCCTGAATCCGGTCCAGGTACCTCTGAAAGCGCTACTC | ESGPGTSTEPSEGSAP |
| | CGGAGTCTGGCCCAGGTACCTCTACTGAACCGTCTGAGG | GTSTEPSEGSAPGTSE |
| | GTAGCGCTCCAGGTACTTCTACTGAACCGTCCGAAGGTA | SATPESGPGTSTEPSE |
| | GCGCACCAGGTACTTCTGAAAGCGCTACTCCGGAGTCCG | GSAPGTSTEPSEGSAP |
| | GTCCAGGTACCTCTACCGAACCGTCCGAAGGCAGCGCTC | |
| | CAGGTACTTCTACTGAACCTTCTGAGGGTAGCGCTCCC | |
| LCW462_r47 | GGTACCTCTACCGAACCGTCCGAGGGTAGCGCACCAGGT | GTSTEPSEGSAPGTST |
| | ACCTCTACTGAACCGTCTGAGGGTAGCGCTCCAGGTAGC | EPSEGSAPGSEPATSG |
| | GAACCGGCAACCTCCGGTTCTGAAACTCCAGGTACTTCTA | SETPGTSTEPSEGSAP |
| | CTGAACCGTCTGAAGGTAGCGCACCAGGTACTTCTGAAA | GTSESATPESGPGTSE |
| | GCGCAACCCCGGAATCCGGCCCAGGTACCTCTGAAAGCG | SATPESGPGASPGTSS |
| | CAACCCCGGAGTCCGGCCCAGGTGCATCTCCGGGTACTA | TGSPGSSPSASTGTGP |
| | GCTCTACCGGTTCTCCAGGTTCTAGCCCTTCTGCTTCCACT | GSSTPSGATGSPGSST |
| | GGTACCGGCCCAGGTAGCTCTACCCCGTCTGGTGCTACTG | PSGATGSPGSSTPSGA |
| | GTTCCCCAGGTAGCTCTACTCCGTCTGGTGCAACCGGTTC | TGSPGASPGTSSTGSP |
| | CCCAGGTAGCTCTACTCCTTCTGGTGCTACTGGCTCCCCA | |
| | GGTGCATCCCCTGGCACCAGCTCTACCGGTTCTCCA | |
| LCW462_r54 | GGTAGCGAACCGGCAACCTCTGGCTCTGAAACTCCAGGT | GSEPATSGSETPGSEP |
| | AGCGAACCTGCAACCTCCGGCTCTGAAACCCCAGGTACT | ATSGSETPGTSTEPSE |
| | TCTACTGAACCTTCTGAGGGCAGCGCACCAGGTAGCGAA | GSAPGSEPATSGSETP |
| | CCTGCAACCTCTGGCTCTGAAACCCCAGGTACCTCTGAAA | GTSESATPESGPGTST |
| | GCGCTACTCCTGAATCTGGCCCAGGTACTTCTACTGAACC | EPSEGSAPGSSTPSGA |
| | GTCCGAGGGCAGCGCACCAGGTAGCTCTACTCCGTCTGG | TGSPGSSTPSGATGSP |
| | TGCTACCGGCTCTCCAGGTAGCTCTACCCCTTCTGGTGCA | GASPGTSSTGSPGSST |
| | ACCGGCTCCCCAGGTGCTTCTCCGGGTACCAGCTCTACTG | PSGATGSPGASPGTSS |
| | GTTCTCCAGGTAGCTCTACCCCGTCTGGTGCTACCGGTTC | TGSPGSSTPSGATGSP |
| | CCCAGGTGCTTCTCCTGGTACTAGCTCTACCGGTTCTCCA | |
| | GGTAGCTCTACCCCGTCTGGTGCTACTGGCTCTCCA | |
| LCW462_r55 | GGTACTTCTACCGAACCGTCCGAGGGCAGCGCTCCAGGT | GTSTEPSEGSAPGTST |
| | ACTTCTACTGAACCTTCTGAAGGCAGCGCTCCAGGTACTT | EPSEGSAPGTSTEPSE |
| | CTACTGAACCTTCCGAAGGTAGCGCACCAGGTACTTCTGA | GSAPGTSESATPESGP |
| | AAGCGCTACTCCGGAGTCCGGTCCAGGTACCTCTACCGA | GTSTEPSEGSAPGTST |
| | ACCGTCCGAAGGCAGCGCTCCAGGTACTTCTACTGAACCT | EPSEGSAPGSTSESPS |
| | TCTGAGGGTAGCGCTCCAGGTTCTACTAGCGAATCTCCGT | GTAPGTSPSGESSTAP |
| | CTGGCACTGCTCCAGGTACTTCTCCTAGCGGTGAATCTTC | GTSPSGESSTAPGSPA |
| | TACCGCTCCAGGTACTTCCCCTAGCGGCGAATCTTCTACC | GSPTSTEEGTSESATP |
| | GCTCCAGGTAGCCCGGCTGGCTCTCCTACCTCTACTGAGG | ESGPGTSTEPSEGSAP |
| | AAGGTACTTCTGAAAGCGCTACTCCTGAGTCTGGTCCAGG | |
| | TACCTCTACTGAACCGTCCGAAGGTAGCGCTCCA | |
| LCW462_r57 | GGTACTTCTACTGAACCTTCCGAAGGTAGCGCTCCAGGTA | GTSTEPSEGSAPGSEP |
| | GCGAACCTGCTACTTCTGGTTCTGAAACCCCAGGTAGCCC | ATSGSETPGSPAGSPT |
| | GGCTGGCTCTCCGACCTCCACCGAGGAAGGTAGCCCGGC | STEEGSPAGSPTSTEE |
| | AGGCTCTCCGACCTCTACTGAGGAAGGTACTTCTGAAAG | GTSESATPESGPGTST |
| | CGCAACCCCGGAGTCCGGCCCAGGTACCTCTACCGAACC | EPSEGSAPGTSTEPSE |
| | GTCTGAGGGCAGCGCACCAGGTACCTCTACTGAACCTTCC | GSAPGTSTEPSEGSAP |
| | GAAGGCAGCGCTCCAGGTACCTCTACCGAACCGTCCGAG | GTSESATPESGPGSST |
| | GGCAGCGCACCAGGTACTTCTGAAAGCGCAACCCCTGAA | PSGATGSPGSSPSAST |
| | TCCGGTCCAGGTAGCTCTACTCCGTCTGGTGCAACCGGCT | GTGPGASPGTSSTGSP |
| | CCCCAGGTTCTAGCCCGTCTGCTTCCACTGGTACTGGCCC | |
| | AGGTGCTTCCCCGGGCACCAGCTCTACTGGTTCTCCA | |
| LCW462_r61 | GGTAGCGAACCGGCTACTTCCGGCTCTGAGACTCCAGGT | GSEPATSGSETPGSPA |
| | AGCCCTGCTGGCTCTCCGACCTCTACCGAAGAAGGTACCT | GSPTSTEEGTSESATP |
| | CTGAAAGCGCTACCCCTGAGTCTGGCCCAGGTACCTCTAC | ESGPGTSTEPSEGSAP |
| | TGAACCTTCCGAAGGCAGCGCTCCAGGTACCTCTACCGA | GTSTEPSEGSAPGTSE |
| | ACCGTCCGAGGGCAGCGCACCAGGTACTTCTGAAAGCGC | SATPESGPGTSTPESG |
| | AACCCCTGAATCCGGTCCAGGTACCTCTACTCCGGAAAG | SASPGSTSESPSGTAP |
| | CGGTTCCGCATCTCCAGGTTCTACCAGCGAATCCCCGTCT | GSTSSTAESPGPGTSE |
| | GGCACCGCACCAGGTTCTACTAGCTCTACTGCTGAATCTC | SATPESGPGTSTEPSE |
| | CGGGCCCAGGTACTTCTGAAAGCGCTACTCCGGAGTCCG | GSAPGTSTEPSEGSAP |
| | GTCCAGGTACCTCTACCGAACCGTCCGAAGGCAGCGCTC | |
| | CAGGTACTTCTACTGAACCTTCTGAGGGTAGCGCTCCA | |
| LCW462_r64 | GGTACTTCTACCGAACCGTCCGAGGGCAGCGCTCCAGGT | GTSTEPSEGSAPGTST |
| | ACTTCTACTGAACCTTCTGAAGGCAGCGCTCCAGGTACTT | EPSEGSAPGTSTEPSE |
| | CTACTGAACCTTCCGAAGGTAGCGCACCAGGTACCTCTAC | GSAPGTSTEPSEGSAP |
| | CGAACCGTCTGAAGGTAGCGCACCAGGTACCTCTGAAAG | GTSESATPESGPGTSE |
| | CGCAACTCCTGAGTCCGGTCCAGGTACTTCTGAAAGCGC | SATPESGPGTPGSGTA |
| | AACCCCGGAGTCTGGCCCAGGTACTCCTGGCAGCGGTAC | SSSPGSSTPSGATGSP |
| | CGCATCTTCCTCTCCAGGTAGCTCTACTCCGTCTGGTGCA | GASPGTSSTGSPGSTS |
| | ACTGGTTCCCCAGGTGCTTCTCCGGGTACCAGCTCTACCG | STAESPGPGTSPSGES |
| | GTTCTCCAGGTTCCACCAGCTCTACTGCTGAATCTCCTGG | STAPGTSTPESGSASP |
| | TCCAGGTACCTCTCCTAGCGGTGAATCTTCTACTGCTCCA | |
| | GGTACTTCTACTCCTGAAAGCGGCTCTGCTTCTCCA | |
| LCW462_r67 | GGTAGCCCGGCAGGCTCTCCGACCTCTACTGAGGAAGGT | GSPAGSPTSTEEGTSE |
| | ACTTCTGAAAGCGCAACCCCGGAGTCCGGCCCAGGTACC | SATPESGPGTSTEPSE |
| | TCTACCGAACCGTCTGAGGGCAGCGCACCAGGTACTTCT | GSAPGTSESATPESGP |
| | GAAAGCGCAACCCCTGAATCCGGTCCAGGTAGCGAACCG | GSEPATSGSETPGTST |
| | GCTACTTCTGGCTCTGAGACTCCAGGTACTTCTACCGAAC | EPSEGSAPGSPAGSPT |
| | CGTCCGAAGGTAGCGCACCAGGTAGCCCGGCTGGTTCTC | STEEGTSTEPSEGSAP |
| | CGACTTCCACCGAGGAAGGTACCTCTACTGAACCTTCTGA | GTSTEPSEGSAPGTST |
| | GGGTAGCGCTCCAGGTACCTCTACTGAACCTTCCGAAGG | EPSEGSAPGTSTEPSE |
| | CAGCGCTCCAGGTACTTCTACCGAACCGTCCGAGGGCAG | GSAPGTSTEPSEGSAP |
| | CGCTCCAGGTACTTCTACTGAACCTTCTGAAGGCAGCGCT | |
| | CCAGGTACTTCTACTGAACCTTCCGAAGGTAGCGCACCA | |
| LCW462_r69 | GGTACTTCTCCGAGCGGTGAATCTTCTACCGCACCAGGTT | GTSPSGESSTAPGSTS |
| | CTACTAGCTCTACCGCTGAATCTCCGGGCCCAGGTACTTC | STAESPGPGTSPSGES |
| | TCCGAGCGGTGAATCTTCTACTGCTCCAGGTACCTCTGAA | STAPGTSESATPESGP |
| | AGCGCTACTCCGGAGTCTGGCCCAGGTACCTCTACTGAAC | GTSTEPSEGSAPGTST |
| | CGTCTGAGGGTAGCGCTCCAGGTACTTCTACTGAACCGTC | EPSEGSAPGSSPSAST |
| | CGAAGGTAGCGCACCAGGTTCTAGCCCTTCTGCATCTACT | GTGPGSSTPSGATGSP |
| | GGTACTGGCCCAGGTAGCTCTACTCCTTCTGGTGCTACCG | GASPGTSSTGSPGTST |
| | GCTCTCCAGGTGCTTCTCCGGGTACTAGCTCTACCGGTTC | PESGSASPGTSPSGES |
| | TCCAGGTACTTCTACTCCGGAAAGCGGTTCCGCATCTCCA | STAPGTSPSGESSTAP |
| | GGTACTTCTCCTAGCGGTGAATCTTCTACTGCTCCAGGTA | |
| | CCTCTCCTAGCGGCGAATCTTCTACTGCTCCA | |
| LCW462_r70 | GGTACCTCTGAAAGCGCTACTCCGGAGTCTGGCCCAGGT | GTSESATPESGPGTST |
| | ACCTCTACTGAACCGTCTGAGGGTAGCGCTCCAGGTACTT | EPSEGSAPGTSTEPSE |
| | CTACTGAACCGTCCGAAGGTAGCGCACCAGGTAGCCCTG | GSAPGSPAGSPTSTEE |
| | CTGGCTCTCCGACTTCTACTGAGGAAGGTAGCCCGGCTGG | GSPAGSPTSTEEGTST |
| | TTCTCCGACTTCTACTGAGGAAGGTACTTCTACCGAACCT | EPSEGSAPGSSPSAST |
| | TCCGAAGGTAGCGCTCCAGGTTCTAGCCCTTCTGCTTCCA | GTGPGSSTPSGATGSP |
| | CCGGTACTGGCCCAGGTAGCTCTACCCCTTCTGGTGCTAC | GSSTPSGATGSPGSEP |
| | CGGCTCCCCAGGTAGCTCTACTCCTTCTGGTGCAACTGGC | ATSGSETPGTSESATP |
| | TCTCCAGGTAGCGAACCGGCAACTTCCGGCTCTGAAACC | ESGPGSEPATSGSETP |
| | CCAGGTACTTCTGAAAGCGCTACTCCTGAGTCTGGCCCAG | |
| | GTAGCGAACCTGCTACCTCTGGCTCTGAAACCCCA | |
| LCW462_r72 | GGTACTTCTACCGAACCGTCCGAAGGCAGCGCTCCAGGT | GTSTEPSEGSAPGTST |
| | ACCTCTACTGAACCTTCCGAGGGCAGCGCTCCAGGTACCT | EPSEGSAPGTSTEPSE |
| | CTACCGAACCTTCTGAAGGTAGCGCACCAGGTAGCTCTA | GSAPGSSTPSGATGSP |
| | CCCCGTCTGGTGCTACCGGTTCCCCAGGTGCTTCTCCTGG | GASPGTSSTGSPGSST |
| | TACTAGCTCTACCGGTTCTCCAGGTAGCTCTACCCCGTCT | PSGATGSPGTSESATP |
| | GGTGCTACTGGCTCTCCAGGTACTTCTGAAAGCGCAACCC | ESGPGSEPATSGSETP |
| | CTGAATCCGGTCCAGGTAGCGAACCGGCTACTTCTGGCTC | GTSTEPSEGSAPGSTS |
| | TGAGACTCCAGGTACTTCTACCGAACCGTCCGAAGGTAG | ESPSGTAPGSTSESPS |
| | CGCACCAGGTTCTACTAGCGAATCTCCTTCTGGCACTGCA | GTAPGTSTPESGSASP |
| | CCAGGTTCTACCAGCGAATCTCCGTCTGGCACTGCACCAG | |
| | GTACCTCTACCCCTGAAAGCGGTTCCGCTTCTCCA | |
| LCW462_r73 | GGTACCTCTACTCCTGAAAGCGGTTCTGCATCTCCAGGTT | GTSTPESGSASPGSTS |
| | CCACTAGCTCTACCGCAGAATCTCCGGGCCCAGGTTCTAC | STAESPGPGSTSSTAE |
| | TAGCTCTACTGCTGAATCTCCTGGCCCAGGTTCTAGCCCT | SPGPGSSPSASTGTGP |
| | TCTGCATCTACTGGTACTGGCCCAGGTAGCTCTACTCCTT | GSSTPSGATGSPGASP |
| | CTGGTGCTACCGGCTCTCCAGGTGCTTCTCCGGGTACTAG | GTSSTGSPGSEPATSG |
| | CTCTACCGGTTCTCCAGGTAGCGAACCGGCAACCTCCGGC | SETPGTSESATPESGP |
| | TCTGAAACCCCAGGTACCTCTGAAAGCGCTACTCCTGAAT | GSPAGSPTSTEEGSTS |
| | CCGGCCCAGGTAGCCCGGCAGGTTCTCCGACTTCCACTGA | ESPSGTAPGSTSESPS |
| | GGAAGGTTCTACTAGCGAATCTCCTTCTGGCACTGCACCA | GTAPGTSTPESGSASP |
| | GGTTCTACCAGCGAATCTCCGTCTGGCACTGCACCAGGTA | |
| | CCTCTACCCCTGAAAGCGGTTCCGCTTCTCCC | |
| LCW462_r78 | GGTAGCCCGGCTGGCTCTCCTACCTCTACTGAGGAAGGTA | GSPAGSPTSTEEGTSE |
| | CTTCTGAAAGCGCTACTCCTGAGTCTGGTCCAGGTACCTC | SATPESGPGTSTEPSE |
| | TACTGAACCGTCCGAAGGTAGCGCTCCAGGTTCTACCAG | GSAPGSTSESPSGTAP |
| | CGAATCTCCTTCTGGCACCGCTCCAGGTTCTACTAGCGAA | GSTSESPSGTAPGTSP |
| | TCCCCGTCTGGTACCGCACCAGGTACTTCTCCTAGCGGCG | SGESSTAPGTSTEPSE |
| | AATCTTCTACCGCACCAGGTACCTCTACCGAACCTTCCGA | GSAPGSPAGSPTSTEE |
| | AGGTAGCGCTCCAGGTAGCCCGGCAGGTTCTCCTACTTCC | GTSTEPSEGSAPGSEP |
| | ACTGAGGAAGGTACTTCTACCGAACCTTCTGAGGGTAGC | ATSGSETPGTSESATP |
| | GCACCAGGTAGCGAACCTGCAACCTCTGGCTCTGAAACC | ESGPGTSTEPSEGSAP |
| | CCAGGTACCTCTGAAAGCGCTACTCCTGAATCTGGCCCAG | |
| | GTACTTCTACTGAACCGTCCGAGGGCAGCGCACCA | |
| LCW462_r79 | GGTACCTCTACCGAACCTTCCGAAGGTAGCGCTCCAGGT | GTSTEPSEGSAPGSPA |
| | AGCCCGGCAGGTTCTCCTACTTCCACTGAGGAAGGTACTT | GSPTSTEEGTSTEPSE |
| | CTACCGAACCTTCTGAGGGTAGCGCACCAGGTACCTCCCC | GSAPGTSPSGESSTAP |
| | TAGCGGCGAATCTTCTACTGCTCCAGGTACCTCTCCTAGC | GTSPSGESSTAPGTSP |
| | GGCGAATCTTCTACCGCTCCAGGTACCTCCCCTAGCGGTG | SGESSTAPGSTSESPS |
| | AATCTTCTACCGCACCAGGTTCTACCAGCGAATCCCCTTC | GTAPGSTSESPSGTAP |
| | TGGTACTGCTCCAGGTTCTACCAGCGAATCCCCTTCTGGC | GTSTPESGSASPGSEP |
| | ACCGCACCAGGTACTTCTACCCCTGAAAGCGGCTCCGCTT | ATSGSETPGTSESATP |
| | CTCCAGGTAGCGAACCTGCAACCTCTGGCTCTGAAACCCC | ESGPGTSTEPSEGSAP |
| | AGGTACCTCTGAAAGCGCTACTCCTGAATCTGGCCCAGGT | |
| | ACTTCTACTGAACCGTCCGAGGGCAGCGCACCA | |
| LCW462_r87 | GGTAGCGAACCGGCAACCTCTGGCTCTGAAACCCCAGGT | GSEPATSGSETPGTSE |
| | ACCTCTGAAAGCGCTACTCCGGAATCTGGTCCAGGTACTT | SATPESGPGTSESATP |
| | CTGAAAGCGCTACTCCGGAATCCGGTCCAGGTACTTCTCC | ESGPGTSPSGESSTAP |
| | GAGCGGTGAATCTTCTACCGCACCAGGTTCTACTAGCTCT | GSTSSTAESPGPGTSP |
| | ACCGCTGAATCTCCGGGCCCAGGTACTTCTCCGAGCGGTG | SGESSTAPGSTSESPS |
| | AATCTTCTACTGCTCCAGGTTCTACTAGCGAATCCCCGTC | GTAPGTSPSGESSTAP |
| | TGGTACTGCTCCAGGTACTTCCCCTAGCGGTGAATCTTCT | GSTSSTAESPGPGSST |
| | ACTGCTCCAGGTTCTACCAGCTCTACCGCAGAATCTCCGG | PSGATGSPGSSTPSGA |
| | GTCCAGGTAGCTCTACTCCGTCTGGTGCAACCGGTTCCCC | TGSPGSSTPSGANWLS |
| | AGGTAGCTCTACCCCTTCTGGTGCAACCGGCTCCCCAGGT | |
| | AGCTCTACCCCTTCTGGTGCAAACTGGCTCTCC | |
| LCW462_r88 | GGTAGCCCTGCTGGCTCTCCGACTTCTACTGAGGAAGGTA | GSPAGSPTSTEEGSPA |
| | GCCCGGCTGGTTCTCCGACTTCTACTGAGGAAGGTACTTC | GSPTSTEEGTSTEPSE |
| | TACCGAACCTTCCGAAGGTAGCGCTCCAGGTACCTCTACT | GSAPGTSTEPSEGSAP |
| | GAACCTTCCGAAGGCAGCGCTCCAGGTACCTCTACCGAA | GTSTEPSEGSAPGTSE |
| | CCGTCCGAGGGCAGCGCACCAGGTACTTCTGAAAGCGCA | SATPESGPGASPGTSS |
| | ACCCCTGAATCCGGTCCAGGTGCATCTCCTGGTACCAGCT | TGSPGSSTPSGATGSP |
| | CTACCGGTTCTCCAGGTAGCTCTACTCCTTCTGGTGCTAC | GASPGTSSTGSPGSST |
| | TGGCTCTCCAGGTGCTTCCCCGGGTACCAGCTCTACCGGT | PSGATGSPGTPGSGT |
| | TCTCCAGGTAGCTCTACCCCGTCTGGTGCTACTGGTTCTC | ASSSPGSSTPSGATGSP |
| | CAGGTACTCCGGGCAGCGGTACTGCTTCTTCCTCTCCAGG | |
| | TAGCTCTACCCCTTCTGGTGCTACTGGCTCTCCA | |
| LCW462_r89 | GGTAGCTCTACCCCGTCTGGTGCTACTGGTTCTCCAGGTA | GSSTPSGATGSPGTPG |
| | CTCCGGGCAGCGGTACTGCTTCTTCCTCTCCAGGTAGCTC | SGTASSSPGSSTPSGA |
| | TACCCCTTCTGGTGCTACTGGCTCTCCAGGTAGCCCGGCT | TGSPGSPAGSPTSTEE |
| | GGCTCTCCTACCTCTACTGAGGAAGGTACTTCTGAAAGCG | GTSESATPESGPGTST |
| | CTACTCCTGAGTCTGGTCCAGGTACCTCTACTGAACCGTC | EPSEGSAPGTSESATP |
| | CGAAGGTAGCGCTCCAGGTACCTCTGAAAGCGCAACTCC | ESGPGSEPATSGSETP |
| | TGAGTCTGGCCCAGGTAGCGAACCTGCTACCTCCGGCTCT | GTSESATPESGPGTST |
| | GAGACTCCAGGTACCTCTGAAAGCGCAACCCCGGAATCT | EPSEGSAPGTSESATP |
| | GGTCCAGGTACTTCTACTGAACCGTCTGAAGGTAGCGCA | ESGPGTSESATPESGP |
| | CCAGGTACTTCTGAAAGCGCAACCCCGGAATCCGGCCCA | |
| | GGTACCTCTGAAAGCGCAACCCCGGAGTCCGGCCCA | |

### Example 7

### Construction of XTEN_AM288

[0540] The entire library LCW0462 was dimerized as described in Example 6 resulting in a library of XTEN_AM288 clones designated LCW0463. 1512 isolates from library LCW0463 were screened using the protocol described in Example 6. 176 highly expressing clones were sequenced and 40 preferred XTEN_AM288 segments were chosen for the construction of multifunctional proteins that contain multiple XTEN segments with 288 amino acid residues.

### Example 8

### Construction of XTEN_AM432

[0541] We generated a library of XTEN_AM432 segments by recombining segments from library LCW0462 of XTEN_AM144 segments and segments from library LCW0463 of XTEN_AM288 segments. This new library of XTEN_AM432 segment was designated LCW0464. Plasmid was isolated from cultures of E. coli harboring LCW0462 and LCW0463, respectively. 1512 isolates from library LCW0464 were screened using the protocol described in Example 6. 176 highly expressing clones were sequenced and 39 preferred XTEN_AM432 segment were chosen for the construction of longer XTENs and for the construction of multifunctional proteins that contain multiple XTEN segments with 432 amino acid residues.

[0542] In parallel we constructed library LMS0100 of XTEN_AM432 segments using preferred segments of XTEN_AM144 and XTEN_AM288. Screening of this library yielded 4 isolates that were selected for further construction

### Example 9

### Construction of XTEN_AM875

[0543] The stuffer vector pCW0359 was digested with BsaI and KpnI to remove the stuffer segment and the resulting vector fragment was isolated by agarose gel purification.

[0544] We annealed the phosphorylated oligonucleotide “BsaI-AscI-KpnIforP”: AGGTGCAAGCGCAAGCGGCGCGCCAAGCACGGGAGGTTCGTCTTCACTCGAGGGTAC and the non-phosphorylated oligonucleotide “BsaI-AscI-KpnIrev”: CCTCGAGTGAAGACGAACCTCCCGTGCTTGGCGCGCCGCTTGCGCTTGC for introducing the sequencing island A (SI-A) which encodes amino acids GASASGAPSTG and has the restriction enzyme AscI recognition nucleotide sequence GGCGCGCC inside. The annealed oligonucleotide pairs were ligated with BsaI and KpnI digested stuffer vector pCW0359 prepared above to yield pCW0466 containing SI-A. We then generated a library of XTEN_AM443 segments by recombining 43 preferred XTEN_AM432 segments from Example 8 and SI-A segments from pCW0466 at C-terminus using the same dimerization process described in Example 5. This new library of XTEN_AM443 segments was designated LCW0479. We generated a library of XTEN_AM875 segments by recombining segments from library LCW0479 of XTEN_AM443 segments and 43 preferred XTEN_AM432 segments from Example 8 using the same dimerization process described in Example 5. This new library of XTEN_AM875 segment was designated LCW0481.

### Example 10

### Construction of XTEN_AM1318

[0545] We annealed the phosphorylated oligonucleotide “BsaI-FseI-KpnIforP”: AGGTCCAGAACCAACGGGGCCGGCCCCAAGCGGAGGTTCGTCTTCACTCGAGGGTAC and the non-phosphorylated oligonucleotide “BsaI-FseI-KpnIrev”: CCTCGAGTGAAGACGAACCTCCGCTTGGGGCCGGCCCCGTTGGTTCTGG for introducing the sequencing island B (SI-B) which encodes amino acids GPEPTGPAPSG and has the restriction enzyme FseI recognition nucleotide sequence GGCCGGCC inside. The annealed oligonucleotide pairs were ligated with BsaI and KpnI digested stuffer vector pCW0359 as used in Example 9 to yield pCW0467 containing SI-B. We then generated a library of XTEN_AM443 segments by recombining 43 preferred XTEN_AM432 segments from Example 8 and SI-B segments from pCW0467 at C-terminus using the same dimerization process described in Example 5. This new library of XTEN_AM443 segments was designated LCW0480.

[0546] We generated a library of XTEN_AM1318 segments by recombining segments from library LCW0480 of XTEN_AM443 segments and segments from library LCW0481 of XTEN_AM875 segments using the same dimerization process as in Example 5. This new library of XTEN_AM1318 segment was designated LCW0487.

### Example 11

### Construction of XTEN_AD864

[0547] Using the several consecutive rounds of dimerization, we assembled a collection of XTEN_AD864 sequences starting from segments of XTEN_AD36 listed in Example 1. These sequences were assembled as described in Example 5. Several isolates from XTEN_AD864 were evaluated and found to show good expression and excellent solubility under physiological conditions. One intermediate construct of XTEN_AD576 was sequenced. This clone was evaluated in a PK experiment in cynomolgus monkeys and a half-life of about 20 h was measured.

### Example 12

### Construction of XTEN_AF864

[0548] Using the several consecutive rounds of dimerization, we assembled a collection of XTEN_AF864 sequences starting from segments of XTEN_AF36 listed in Example 3. These sequences were assembled as described in Example 5. Several isolates from XTEN_AF864 were evaluated and found to show good expression and excellent solubility under physiological conditions. One intermediate construct of XTEN_AF540 was sequenced. This clone was evaluated in a PK experiment in cynomolgus monkeys and a half-life of about 20 h was measured. A full length clone of XTEN_AF864 had excellent solubility and showed half-life exceeding 60 h in cynomolgus monkeys. A second set of XTEN_AF sequences was assembled including a sequencing island as described in Example 9.

### Example 13

### Construction of XTEN_AG864

[0549] Using the several consecutive rounds of dimerization, we assembled a collection of XTEN_AG864 sequences starting from segments of XTEN_AG36 listed in Example 4. These sequences were assembled as described in Example 5. Several isolates from XTEN_AG864 were evaluated and found to show good expression and excellent solubility under physiological conditions. A full-length clone of XTEN_AG864 had excellent solubility and showed half-life exceeding 60 h in cynomolgus monkeys.

### Example 14

### Methods of Producing and Evaluating CFXTEN with Internal and Terminal XTEN

[0550] The design, construction and evaluation of CFXTEN comprising FVIII and one or more XTEN is accomplished using a systematic approach. The regions suitable for XTEN insertion sites include, but are to limited to regions at or proximal to the known domain boundaries of FVIII, exon boundaries, known surface loops, regions with a low degree of order, and hydrophilic regions. By analysis of the foregoing, different regions across the sequence of the FVIII B domain deleted (BDD) sequence have been identified as insertion sites for XTEN, non-limiting examples of which are listed in Tables 5 and 25, and shown schematically in FIGS. 6 and 7. Individual constructs are created (using methods described, below) in which DNA encoding a single XTEN or XTEN fragment of a length ranging from 6 to 2004 amino acid residues is inserted into the FVIII sequence corresponding to or near (e.g., within 6 amino acids) each of the single insertion sites identified in Table 5 and Table 25, and the resulting constructs are expressed and the recovered protein then evaluated for their effects on retention of procoagulant activity using, e.g., one of the in vitro assays of Table 27. For example, using the methods described below, constructs are made in which an AG42 sequence is inserted between the A1 and A2 domain sequences of FVIII, and the resulting expressed fusion protein is evaluated in a chromogenix assay of Table 27, compared to a FVIII not linked to XTEN. CFXTEN fusion proteins can be further classified acting to high, intermediate and low categories based on the activities they exhibit. In those cases where the CFXTEN exhibits activity that is comparable or modestly reduced compared to FVIII, the insertion site is deemed favorable. In those cases where the activity is intermediate, the insertion site can be adjusted from 1-6 amino acids towards the N- or C-terminus of the insertion site and/or the length or net charge of the XTEN may be altered and the resulting construct(s) re-evaluated to determine whether the activity is improved. Alternatively, the XTEN is inserted into the construct with flanking cleavage sites; preferably sites that are susceptible to cleavage by proteases found in clotting assays, such that the XTEN is released during the activation of the FVIII component, thereby providing additional information about the suitability of the XTEN insertion site in the fusion protein.

[0551] Once all of the individual insertion sites are evaluated and the favorable insertion sites are identified, constructs are created with two, three, four, five or more XTEN inserted in the favorable sites. The length and net charge of the XTEN (e.g., XTEN of the AE versus AG family) are varied in order to ascertain the effects of these variables on FVIII activity and physicochemical properties of the fusion protein. CFXTEN constructs that retain a desired degree of in vitro FVIII activity are then evaluated in vivo using mouse and/or dog models of hemophilia A, as described in Examples below, or other models known in the art. In addition, CFXTEN constructs are made that incorporate cleavage sequences at or near the junction(s) of FVIII and XTEN (e.g., sequences from Table 7) designed to release the XTEN and are evaluated for enhancement of FVIII activity and effects on terminal half-life. By the iterative process of making constructs combining different insertion sites, varying the length and composition qualities of the XTEN (e.g., different XTEN families), and evaluation, the skilled artisan obtains, by the foregoing methods, CFXTEN with desired properties, such as but not limited to of procoagulant FVIII activity, enhanced pharmacokinetic properties, ability to administer to a subject by different routes, and/or enhanced pharmaceutical properties.

### Example 15

### Methods of Producing and Evaluating CFXTEN Containing FVIII and AE_XTEN

[0552] A general scheme for producing and evaluating CFXTEN compositions is presented in FIG. 13, and forms the basis for the general description of this Example. Using the disclosed methods and those known to one of ordinary skill in the art, together with guidance provided in the illustrative examples, a skilled artesian can create and evaluate CFXTEN fusion proteins comprising XTEN and FVIII or variants of FVIII known in the art. The Example is, therefore, to be construed as merely illustrative, and not limitative of the methods in any way whatsoever; numerous variations will be apparent to the ordinarily skilled artisan. In this Example, a CFXTEN of a factor VIII BDD linked to an XTEN of the AE family of motifs is created.

[0553] The general scheme for producing polynucleotides encoding XTEN is presented in FIGS. 11 and 12. FIG. 12 is a schematic flowchart of representative steps in the assembly of an XTEN polynucleotide construct in one of the embodiments of the invention. Individual oligonucleotides 501 are annealed into sequence motifs 502 such as a 12-amino acid motif (“12-mer”), which is ligated to additional sequence motifs from a library that can multimerize to create a pool that encompasses the desired length of the XTEN 504, as well as ligated to a smaller concentration of an oligo containing BbsI, and KpnI restriction sites 503. The motif libraries include specific sequence XTEN families; e.g., AD, AE, AF, AG, AM, or AQ sequences of Table 3. As illustrated in FIG. 12, the XTEN length, in this case, is 36 amino acid residues, but longer lengths are also achieved by this general process. For example, multimerization is performed by ligation, overlap extension, PCR assembly or similar cloning techniques known in the art. The resulting pool of ligation products is gel-purified and the band with the desired length of XTEN is cut, resulting in an isolated XTEN gene with a stopper sequence 505. The XTEN gene can be cloned into a stuffer vector. In this case, the vector encodes an optional CBD sequence 506 and a GFP gene 508. Digestion is then performed with BbsI/HindIII to remove 507 and 508 and place the stop codon. The resulting product is then cloned into a BsaI/HindIII digested vector containing a gene encoding the FVIII, resulting in the gene 500 encoding a CFXTEN fusion protein. As would be apparent to one of ordinary skill in the art, the methods are applied to create constructs in alternative configurations and with varying XTEN lengths.

[0554] DNA sequences encoding FVIII are conveniently obtained by standard procedures known in the art from a cDNA library prepared from an appropriate cellular source, from a genomic library, or may be created synthetically (e.g., automated nucleic acid synthesis) using DNA sequences obtained from publicly available databases, patents, or literature references. In the present example, a FVIII B domain deleted (BDD) variant is prepared as described in Example 17. A gene or polynucleotide encoding the FVIII portion of the protein or its complement is then cloned into a construct, such as those described herein, which can be a plasmid or other vector under control of appropriate transcription and translation sequences for high level protein expression in a biological system. A second gene or polynucleotide coding for the XTEN portion or its complement is genetically fused to the nucleotides encoding the terminus of the FVIII gene by cloning it into the construct adjacent and in frame with the gene coding for the CF, through a ligation or multimerization step. In this manner, a chimeric DNA molecule coding for (or complementary to) the CFXTEN fusion protein is generated within the construct. Optionally, a gene encoding for a second XTEN is inserted and ligated in-frame internally to the nucleotides encoding the FVIII-encoding region. The constructs are designed in different configurations to encode various insertion sites of the XTEN in the FVIII sequence, including those of Table 5 or Table 25 or as illustrated in FIG. 7. Optionally, this chimeric DNA molecule is transferred or cloned into another construct that is a more appropriate expression vector; e.g., a vector appropriate for a mammalian host cell such as CHO, BHK and the like. At this point, a host cell capable of expressing the chimeric DNA molecule is transformed with the chimeric DNA molecule, described more completely, below, or by well-known methods, depending on the type of cellular host, as described supra.

[0555] Host cells containing the XTEN-FVIII expression vector are cultured in conventional nutrient media modified as appropriate for activating the promoter. The culture conditions, such as temperature, pH and the like, are those previously used with the host cell selected for expression, and will be apparent to the ordinarily skilled artisan. After expression of the fusion protein, culture broth is harvested and separated from the cell mass and the resulting crude extract retained for purification of the fusion protein.

[0556] Gene expression is measured in a sample directly, for example, by conventional Southern blotting, Northern blotting to quantitate the transcription of mRNA [Thomas, Proc. Natl. Acad. Sci. USA, 77:5201-5205 (1980)], dot blotting (DNA analysis), or in situ hybridization, using an appropriately labeled probe, based on the sequences provided herein. Alternatively, gene expression is measured by immunological of fluorescent methods, such as immunohistochemical staining of cells to quantitate directly the expression of gene product. Antibodies useful for immunohistochemical staining and/or assay of sample fluids may be either monoclonal or polyclonal, and may be prepared in any mammal. Conveniently, the antibodies may be prepared against the FVIII sequence polypeptide using a synthetic peptide based on the sequences provided herein or against exogenous sequence fused to FVIII and encoding a specific antibody epitope. Examples of selectable markers are well known to one of skill in the art and include reporters such as enhanced green fluorescent protein (EGFP), beta-galactosidase (β-gal) or chloramphenicol acetyltransferase (CAT).

[0557] The CFXTEN polypeptide product is purified via methods known in the art. Procedures such as gel filtration, affinity purification, salt fractionation, ion exchange chromatography, size exclusion chromatography, hydroxyapatite adsorption chromatography, hydrophobic interaction chromatography or gel electrophoresis are all techniques that may be used in the purification. Specific methods of purification are described in Robert K. Scopes, Protein Purification: Principles and Practice, Charles R. Castor, ed., Springer-Verlag 1994, and Sambrook, et al., supra. Multi-step purification separations are also described in Baron, et al., Crit. Rev. Biotechnol. 10:179-90 (1990) and Below, et al., J. Chromatogr. A. 679:67-83 (1994).

[0558] As illustrated in FIG. 13, the isolated CFXTEN fusion proteins are characterized for their chemical and activity properties. An isolated fusion protein is characterized, e.g., for sequence, purity, apparent molecular weight, solubility and stability using standard methods known in the art. The fusion protein meeting expected standards is evaluated for activity, which can be measured in vitro or in vivo by measuring one of the factor VIII-associated parameters described herein, using one or more assays disclosed herein, or using the assays of the Examples or Table 27.

[0559] In addition, the CFXTEN FVIII fusion protein is administered to one or more animal species to determine standard pharmacokinetic parameters and pharmacodynamic properties, as described in Examples 25 and 26.

[0560] By the iterative process of producing, expressing, and recovering CFXTEN constructs, followed by their characterization using methods disclosed herein or others known in the art, the CFXTEN compositions comprising CF and an XTEN are produced and evaluated to confirm the expected properties such as enhanced solubility, enhanced stability, improved pharmacokinetics and reduced immunogenicity, leading to an overall enhanced therapeutic activity compared to the corresponding unfused FVIII. For those fusion proteins not possessing the desired properties, a different sequence or configuration is constructed, expressed, isolated and evaluated by these methods in order to obtain a composition with such properties.

### Example 16

### Construction of Expression Plasmids for BDD FVIII

[0561] I. Construction of B Domain Deleted FVIII (BDD FVIII) Expression Vectors

[0562] The expression vector encoding BDD FVIII was created by cloning the BDD FVIII open reading frame into the pcDNA4 vector (Invitrogen, CA) containing a polyA to allow for optimal mammalian expression of the FVIII gene, resulting in a construct designated pBC0100. Several natural sites were identified within this construct for cloning use, including BsiWI 48, AflII 381, PshAI 1098, KpnI 1873, BamHI 1931, PflMI 3094, ApaI 3574, XbaI 4325, NotI 4437, XhoI 4444, BstEII 4449, AgeI 4500, PmeI 4527. To facilitate assay development, nucleotides encoding Myc and His tag were introduced into the FVIII open reading frame. pBC0100 was PCR amplified using the following primers: 1) F8-BsiWI-F: tattccCGTACGgccgccaccATGCAAATAGAGCTCTCCACCT; 2) F8-nostop-XhoI-R1: GGTGACCTCGAGcgtagaggtcctgtgcctcg to introduce BsiWI and XhoI in appropriate locations. The PCR product was digested with BsiWI and XhoI. PcDNA4-Myc-His/C was digested with Acc65I and XhoI, which generated two products of 5003 and 68 bps. The 5003 bps product was ligated with the digested PCR'ed FVIII fragment and used for DH5alpha transformation. The enzymes Acc65I and BsiWI create compatible ends but this ligation destroys the site for future digestion. The resulting construct was designated pBC0102 (pcDNA4-FVIII_{—}3-Myc-His). To facilitate the design and execution of future cloning strategies, especially ones involving the creation of BDD FVIII expression constructs that contain multiple XTEN insertions, we selected additional unique restriction enzyme sites to incorporate, including BsiWI 908, NheI 1829 and ClaI 3281. The introduction of these sites was done via the QuikChange method (Agilent, CA) individually. The resulting construct was designated pBC0112 (pcDNA4-FVIII_{—}4-Myc-His). To avoid problems that may arise from the linker peptides that connects between Myc/His and FVIII/Myc, and to remove restriction enzyme sites that are preferred for future XTEN insertion, we mutated the sequences encoding the peptide sequences from ARGHPF to GAGSPGAETA (between FVIII and Myc), NMHTG to SPATG (between Myc and His) via the QuikChange method. The construct was designated pBC0114 (pcDNA4-FVIII_{—}4-GAGSPGAETA-Myc-SPATG-His) (sequence in Table 14), which was used as the base vector for the design and creation of other expression vectors incorporating XTEN sequences. Expression and FVIII activity data for this construct are presented in

[0563] II. Construction of B Domain Deleted FVIII (BDD FVIII) Expression Vectors

[0564] The gene encoding BDD FVIII is synthesized by GeneArts (Regensburg, Germany) in the cloning vector pMK (pMK-BDD FVIII). The BDD FVIII proteins contain 1457 amino acids at a total molecular weight of 167539.66. There are 6 domains within the wild-type FVIII protein, the A1, A2, B, A3, C1 and C2 domains. In the BDD FVIII protein, most of the B domain has been deleted as it was shown to be an unstructured domain and the removal of the domain does not alter critical functions of this protein. The pMK vector used by GeneArts contains no promoter, and can not be used as an expression vector. Restriction enzyme sites NheI on the 5′ end and SfiI, SalI and XhoI on the 3′ end are introduced to facilitate subcloning of the DNA sequence encoding BDD FVIII into expression vectors, such as CET1019-HS (Millipore). Several unique restriction enzyme sites are also introduced into the FVIII sequence to allow further manipulation (e.g., insertion, mutagenesis) of the DNA sequences. Unique sites listed with their cut site include, but are not limited to: Sad 391, AfiII 700, SpeI 966, PshAI 1417, Acc6512192, KpnI 2192, BamHI 2250, HindIII 2658, PfoI 2960, PflMI 3413, ApaI 3893, Bsp1201 3893, SwaI 4265, OliI 4626, XbaI 4644, and BstBI 4673. The HindIII site resides at the very end of the A2 domain and can potentially be used for modification of the B domain. The synthesized pMK-BDD FVIII from GeneArts does not contain a stop codon. The stop codon is introduced by amplifying a 127 bp fragment of FVIII using the following primers: 5′-GTGAACTCTCTAGACCCACCG-3′; 5′-CTCCTCGAGGTCGACTCAGTAGAGGTCCTGTGCCTCG-3′. The fragment is digested with XbaI and SalI, and ligated to XbaI/SalI digested pMK-BDD FVIII. The ligated DNA mixture is used to transform DH5a bacterial cells. Transformants are screened by DNA miniprep and the desired constructs are confirmed by DNA sequencing. The construct named pBC0027 (pMK-BDD FVIII-STOP) contains coding sequences that encode the BDD FVIII protein. The pBC0027 construct is then digested with NheI/SalI, and ligated with NheI/SalI digested CET1019-HS vector (Millipore). The CET1019-HS vector contains a human CMV promoter and a UCOE sequence to facilitate gene expression. The ligated DNA mixture is used to transform DH5a bacterial cells. Transformants are screened by DNA miniprep and the desired constructs are confirmed by DNA sequencing. The final construct is designated pBC0025 (CET1019-HS-BDD FVIII-STOP), which encodes the BDD FVIII protein under the control of a human CMV promoter. Introduction of the pBC0025 construct into mammalian cells is expected to allow expression of the BDD FVIII protein with procoagulant activity.

### Example 17

### Construction of Expression Plasmids for BDD FVIII Containing XTEN

[0565] 1. B Domain AE42 Insertion

[0566] Two PCR reactions were run to in parallel to insert XTEN_AE42 into the remaining B domain region of the BDD FVIII constructs. The PCR reactions involved the following primers: cgaaagcgctacgcctgagaGTGGCCCTGGCTCTGAGCCAGCCACCTCCGGCTCTGAAACCCCTGCCTCG AGCccaccagtcttgaaacgcc; TGATATGGTATCATCATAATCGATTTCCTCTTGATCTGACTG; agcttgaggatccagagttc; tctcaggcgtagcgctttcgCTTGTCCCCTCTTCTGTTGAGGTGGGGGAGCCAGCAGGAGAACCTGGCGCG CCgttttgagagaagcttcttggt. The PCR products then served as templates, and a second PCR was performed to introduce the XTEN_AE42 into the FVIII encoding nucleotide sequences flanked by BamHI and ClaI. This PCR product was digested with BamHI and ClaI simultaneously with the digestion of PBC0114 with the same two enzymes. The PCR product was ligated to the digested vector. This construct was designated pBC0135 (pcDNA4-FVIII_{—}4XTEN_AE42-GAGSPGAETA-Myc-SPATG-His), and encodes the BDD FVIII with an AE42 XTEN incorporated within the residual B-domain.

[0567] 2. AE42 Insertion and R1648A Mutation

[0568] The QuikChange method (Agilent, CA) was employed to introduce an R1648A mutation into PBC0135. This construct was designated pBC0149 (pcDNA4-FVIII 4XTEN AE42-GAGSPGAETA-Myc-SPATG-His_R1648A), eliminating that FVIII processing site.

[0569] 3. B Domain AE288 Insertion

[0570] XTEN_AE288 was PCR amplified using the following primers: tctcaaaacGGCGCGCCAggtacctcagagtctgctacc and tggtggGCTCGAGGCtggcgcactgccttc. PBC0075 was used as the template for this PCR reaction. The PCR product was digested with AscI and XhoI, and PBC0135 was digested with the same enzymes. The PCR product was ligated to the PBC0135 fragment. This construct was designated pBC0136 (pcDNA4-FVIII_{—}4XTEN_AE288-GAGSPGAETA-Myc-SPATG-His), and encodes the BDD FVIII with an AE288 XTEN incorporated within the residual B-domain.

[0571] 4. AE288 Insertion and R1648A Mutation

[0572] XTEN_AE288 was PCR amplified using the following primers: tctcaaaacGGCGCGCCAggtacctcagagtctgctacc and tggtggGCTCGAGGCtggcgcactgccttc. Construct pBC0075 was used as the template for this PCR reaction. The PCR product was digested with AscI and XhoI, and pBC0149 was digested with the same enzymes. The PCR product was ligated to the pBC0149 fragment. This construct was designated pBC0137 (pcDNA4-FVIII_{—}4XTEN_AE288-GAGSPGAETA-Myc-SPATG-His R1648A) and contains an AE288 XTEN sequence internal to the B domain, with the R1648A mutation eliminating that FVIII processing site.

[0573] Construction of expression Plasmids for BDD FVIII with XTEN Insertion at the C Terminus

[0574] 1. C Terminal AE288 Insertion

[0575] XTEN_AE288 was PCR amplified using the following primers: ggggccgaaacggccggtacctcagagtctgctacc and tgttcggccgtttcggcccctggcgcactgccttc. The construct pBC0075 was used as the template for this PCR reaction. The PCR product was digested with SfiI, and pBC0114 was digested with the same enzyme. The PCR product was ligated to the digested pBC0114 fragment. This construct was designated pBC0145 (pcDNA4-FVIII_{—}4-XTEN_AE288-GAGSPGAETA-Myc-SPATG-His), and encodes an AE288 sequence at the C-terminus of the BDD FVIII.

[0576] 2. C Terminal AG288 Insertion

[0577] XTEN_AG288 was designed and synthesized by DNA2.0 (Menlo Park, Calif.). The synthesized gene was PCR amplified using the following primers: ggggccgaaacggccccgggagcgtcacc and tgttcggccgtttcggcccctgacccggttgcccc. The PCR product was digested with SfiI, and PBC0114 based vector was digested with the same enzyme. The PCR product was ligated to the digested PBC0114 fragment. This construct was designated pBC0146 (pcDNA4-FVIII_{—}4-XTEN_AG288-GAGSPGAETA-Myc-SPATG-His), and encodes an AG288 sequence at the C-terminus of the BDD FVIII.

[0578] Construction of Expression Plasmids for BDD FVIII with Inter- and Intra-Domain XTEN Insertions

[0579] 1. AE42 Insertion

[0580] Four distinct strategies are used for insertion of AE42 into the designated sites (e.g., the natural or introduced restriction sites BsiWI 48, AflII 381, PshAI 1098, KpnI 1873, BamHI 1931, PflMI 3094, ApaI 3574, XbaI 4325, NotI 4437, XhoI 4444, BstEII 4449, AgeI 4500, PmeI 4527, BsiWI 908, NheI 1829 and ClaI 3281) within the BDD FVIII encoding sequence, each contributing to the creation of several constructs. By design, these insertions of AE42 create AscI and XhoI sites flanked on either side of the insertion allowing for introduction/substitution of longer XTEN, as well as XTEN with different sequences or incorporated cleavage sequences, as needed.

[0581] 2. Double PCR-Mediated Method

[0582] Two PCR reactions are run in parallel to insert XTEN_AE42 into the designated site. The two PCR reactions introduce XTEN on either the 3′ or the 5′ end via use of a long primer that contains partial XTEN. The PCR products then serve as templates, and a second PCR is performed to introduce the XTEN_AE42 into the FVIII encoding nucleotide sequences flanked by select restriction enzyme sites. This PCR product is digested with the appropriate enzymes simultaneously with the digestion of PBC0114 using the same two enzymes. The PCR product is ligated to the digested vector. Using this method, constructs are created designated pBC0126, pBC0127, pBC0128, and pBC0129, resulting in AE42 insertions at the R3, P130, L216 locations. The sequences are listed in Table 14.

[0583] 3. QuikChange Mediated Two Step Cloning Method

[0584] The QuikChange method is employed to introduce XTEN_AE7 encoding sequences that are flanked by AscI and XhoI into designated sites. The resulting intermediate construct is then digested with AscI and XhoI. XTEN_AE42 is PCR amplified to introduce the two sites and digested accordingly. The vector and insert are then ligated to create the final constructs, designated pBC0131, pBC0134, pBC0138, pBC0141, pBC0142 and pBC0143, suitable for allowing introduction of longer XTEN, as well as XTEN with different sequences or incorporated cleavage sequences, as needed. The sequences are listed in Table 14.

[0585] 4. Three PCR Type II Restriction Enzyme Mediated Ligation Method

[0586] Three PCR reactions are performed to create two pieces of FVIII encoding fragments flanked by one type I restriction enzyme that correlates with a unique site within the FVIII_{—}4 gene and one type II enzyme (e.g. BsaI, BbsI, BfuAI), the third PCR reaction created the XTEN_AE42 flanked by two type II restriction enzyme sites. The three PCR fragments are digested with appropriate enzymes and ligated into one linear piece that contains the XTEN_AE42 insertion within a fragment of FVIII encoding sequences. This product is then digested with appropriate unique enzymes within the FVIII encoding sequences and ligated to the PBC0114 construct digested with the same enzymes, and result in constructs designated pBC0130 (with XTEN insertion at residue P333), pBC0132 (with XTEN insertion at residue D403), pBC0133 (with XTEN insertion at residue R490). The sequences are listed in Table 14.

[0587] 5. Custom Gene Synthesis

[0588] Custom gene synthesis is performed by GeneArt (Regensburg, Germany). The genes are designed so that they include nucleotides encoding the XTEN_AE42 inserted in the designated site(s) and the genes are flanked by two unique restriction enzyme sites selected within the FVIII_{—}4 gene. The synthesized genes and PBC0114 are digested with appropriate enzymes and ligated to create the final product with the BDD FVIII incorporating the XTEN_AE42 between the restriction sites. All constructs not listed in above strategies are constructed based on this method.

[0589] Construction of Expression Plasmids with Dual XTEN Insertions in the B Domain and at the C Terminus

[0590] The construct pBC0136, which encodes the BDD FVIII with an AE288 XTEN incorporated within the residual B-domain, is digested with BamHI and ClaI, and the resulting 1372 bps fragment from this digestion is the insert. The construct pBC0146 is digested with BamHI and ClaI, and the 9791 bps piece from this digestion is the vector. The vector and insert are ligated together to create pBC0209, containing an AE288 insertion within the B domain and an AG288 on the C terminus. The same strategy is utilized to create constructs containing two AE288 insertions in the B domain and at the C terminus, respectively, using PBC0145 as the vector.

[0591] Construction of Expression Plasmids with Multiple XTEN Insertions

[0592] The construct pBC0127, which encodes an AE42 XTEN at the R3 position of FVIII, is digested with BsiWI and AflII, and the resulting 468 bps fragment from this digestion is the insert. The construct pBC0209 is digested with BsiWI and AflII, the 10830 bps piece from this digestion is the vector. The vector and insert are ligated together to create a construct designated pBC0210, containing an AE42 insertion in the A1 domain, an extra three ATR amino acid to restore the signal cleavage sequence, an AE288 XTEN insertion within the B domain and an AG288 on the C terminus. The same methodology is used to create constructs encoding multiple XTEN at the natural and introduced restriction sites; e.g., BsiWI 48, AflII 381, PshAI 1098, KpnI 1873, BamHI 1931, PflMI 3094, ApaI 3574, XbaI 4325, NotI 4437, XhoI 4444, BstEII 4449, AgeI 4500, PmeI 4527, BsiWI 908, NheI 1829 and ClaI 3281.

[0593] Construction of BDD FVIII-INTERNAL-XTEN_AE288 Expression Vectors

[0594] Two BsaI restriction enzyme sites are introduced into the PBC0027 pMK-BDD FVIII construct between the base pair 2673 and 2674 using the QuikChange method following manufacturer's protocol (Agilent Technologies, CA). The inserted DNA sequences are gggtctcccgcgccagggtctccc, and the resulting construct is designated pBC0205 (sequence in Table 14). The DNA sequence encoding AE288 (or other variants and lengths of XTEN; e.g. AE42, AG42, AG288, AM288) is then PCR'ed with primers that introduce BsaI sites on both the 5′ and 3′. The pBC0205 vector and the insert (XTEN_{—}288) are then digested with BsaI and ligated to create pBC0206, which encodes the FVIII gene with an XTEN_AE288 insertion within the B domain (sequence in Table 14). The pBC0206 construct is then digested with NheI/SalI, and ligated with NheI/SalI digested CET1019-HS vector (Millipore). The CET1019-HS vector contains a human CMV promoter and a UCOE sequence to facilitate gene expression. The ligated DNA mixture is used to transform DH5a bacterial cells. Transformants are screened by DNA miniprep and the desired constructs are confirmed by DNA sequencing. The final construct is designated pBC0207 (CET1019-HS-BDD FVIII-STOP), which encodes the BDD FVIII protein under the control of a human CMV promoter (sequence in Table 14). Introduction of the pBC0207 construct into mammalian cells is expected to allow expression of the BDD FVIII protein with an internal XTEN_AE288. The same protocol is used to introduce, transform and express constructs containing other variants and lengths of XTEN; e.g. AE42, AG42, AG288, AM288, AE864, AG864, or other XTEN of Table 4.

[0595] Construction of BDD FVIII−/−XTEN_AE864 Expression Vectors

[0596] The BDD FVIII fragment with NheI and SfiI flanking the 5′ and 3′ end is generated by digesting the pBC0025 construct. This digested fragment is then ligated to a NheI/SfiI digested pSecTag vector (pBC0048 pSecTag-FVIII−/−XTEN_AE864) encoding the FVIII followed by the XTEN_AE864 sequence. The ligated DNA mixture is used to transform DH5a bacterial cells. Transformants are screened by DNA miniprep and the desired constructs are confirmed by DNA sequencing. The final construct is pBC0060, which encodes the BDD FVIII−/−XTEN_AE864 protein under the control of a human CMV promoter. Introduction of the pBC0060 construct into mammalian cells is expected to express the FVIII protein with a C terminal XTEN fusion (BDD FVIII−/−XTEN_AE864) with procoagulant activity.

[0597] Construction of BDD FVIII-/FXI/-XTEN_AE864 Expression Vectors

[0598] The BDD FVIII fragment with NheI and SfiI flanking the 5′ and 3′ end is generated by digesting the pBC0025 construct. This digested fragment is then ligated to a NheI/SfiI digested pSecTag vector (pBC0047 pSecTag-FVIII-/FXF-XTEN_AE864) encoding the FVIII followed by the FXI cleavage sequence (/FXI/) and XTEN_AE864. The ligated DNA mixture is used to transform DH5a bacterial cells. Transformants are screened by DNA miniprep and the desired constructs are confirmed by DNA sequencing. The final construct is pBC0051, which encodes the BDD FVIII-/FXI/-XTEN_AE864 protein under the control of a human CMV promoter. Introduction of the pBC0051 construct into mammalian cells is expected to express the FVIII protein with a C terminal XTEN fusion (BDD FVIII-/FXI/-XTEN_AE864), which could be subsequently cleaved by FXI, therefore liberating the BDD FVIII protein with procoagulant activity.

[0599] Construction of BDD FVIII−/−XTEN Expression Vectors Comprising AE288 or AG288

[0600] The fused AE864 XTEN sequence in pBC0060 is replaced by digesting the XTEN sequences AE288 and AG288 with BsaI and HindIII. A subsequent ligation step using the respective AE288 or AG288 XTEN fragment and BsaI/HindIII digested pBC0051 allows the exchange of the AE288 or AG288 sequences into the BDD FVIII expression vector. The resulting final constructs are pBC0061 for BDD FVIII-AE288 and pBC0062 for BDD FVIII-AG288. Introduction of the pBC0061 construct into mammalian cells is expected to express the FVIII protein with a C-terminal AE288 XTEN fusion (BDD FVIII−/−XTEN_AE288) with procoagulant activity. Introduction of the pBC0062 construct into mammalian cells is expected to express the FVIII protein with a C-terminal AG288 XTEN fusion (BDD FVIII−/−XTEN_AG288) with procoagulant activity.

[0601] Construction of BDD FVIII-/FXI/-XTEN Expression Vectors with Alternate XTEN

[0602] The fused XTEN sequence in pBC0051 is replaced by digesting DNA encoding other XTEN sequences (e.g. other variants and lengths of XTEN; e.g. AE42, AG42, AG288, AM288) with BsaI and HindIII. A ligation using the XTEN fragment and BsaI/HindIII digested pBC0051 allows the exchange of the various XTEN-encoding sequences into the BDD FVIII expression vector, providing the alternate constructs. Introduction of the alternate constructs into mammalian cells is expected to express the FVIII protein with a C-terminal XTEN (BDD FVIII-/FXI/-XTEN) that can be subsequently cleaved by FXI, releasing the FVIII, resulting in procoagulant FVIII fusion with procoagulant activity.

### Example 18

### Construction of Expression Plasmids for FVIII Signal peptide-XTEN-/FXI/-BDD FVIII

[0603] Construction of Expression Vectors for FVIII Signal peptide-XTEN_AE864

[0604] The coding sequences for the FVIII signal peptide is generated by annealing the following two oligos: 5′-CTAGCATGCAAATAGAGCTCTCCACCTGCTTCTTTCTGTGCCTTTTGCGATTCTGCTTTAGTGG GTCTCC-3′; 5′-ACCTGGAGACCCACTAAAGCAGAATCGCAAAAGGCACAGAAAGAAGCAGGTGGAGAGCTCT ATTTGCATG-3′. The annealed oligos are flanked by the NheI and BsaI restriction enzyme sites on either end, and is ligated to NheI/BsaI digested pCW0645 vector which encodes the FVII-XTEN_AE864. The ligated DNA mixture is used to transform DH5a bacterial cells. Transformants is screened by DNA miniprep and the desired constructs are confirmed by DNA sequencing. The final construct is designated pBC0029, which encodes the signal peptide-XTEN_AE864 protein under the control of a human CMV promoter. This construct is used as an intermediate construct for creating an expression construct with XTEN fused on the N-terminus of the FVIII protein, and can also be used as a master plasmid for creating expression constructs that allow XTEN fusion on the N-terminus of a secreted protein.

[0605] Construction of Signal peptide-XTEN_AE864-/FXI/-BDD FVIII Expression Vectors

[0606] An 1800 bp fragment within the FVIII coding region is amplified using primers that introduce NheI-BbsI-/FXI/-AgeI sites on the 5′ and endogenous KpnI restriction enzyme on the 3′ end. The NheI/KpnI digested FVIII fragment is ligated with NheI/KpnI digested pBC0027 vector. The ligated DNA mixture is used to transform DH5a bacterial cells. Transformants are screened by DNA miniprep and the desired constructs are confirmed by DNA sequencing. The resulting construct is designated pBC0052, which contains sequences that encode the /FXI/-FVIII protein without the FVIII signal peptide. This construct is used as an intermediate construct for creating an expression construct with XTEN fused on the N-terminus of the FVIII protein.

[0607] The pBC0052 vector is digested with BbsI/XhoI enzymes, and is used to ligate with Bbsi/XhoI digested pBC0029. The ligated DNA mixture is used to transform DH5a bacterial cells. Transformants are screened by DNA miniprep and the desired constructs are confirmed by DNA sequencing. The final construct is designated pBC0053, which encodes the signal peptide-XTEN_AE864-/FXI/-BDD FVIII protein under the control of a human CMV promoter. Introduction of the pBC0053 construct into mammalian cells is expected to express the FVIII protein with an N-terminal XTEN fusion (signal peptide-XTEN_AE864-/FXI/-BDD FVIII), which could be subsequently cleaved by FXI, therefore liberating the BDD FVIII protein.

[0608] Construction of Signal peptide-XTEN-/FXI/-BDD FVIII Expression Vectors

[0609] The fused XTEN sequence in pBC0053 can be replaced by digesting other XTEN fragments (e.g. AM, AF, AG) with BsaI and BbsI. A ligation using the XTEN fragment and BsaI/BbsI digested pBC0053 allows the exchange of various XTEN pieces (e.g. AM, AF, AG) into the BDD FVIII expression vector. Various XTEN fusions can increase the half lives of these proteins differently, allowing modification of the properties (e.g. efficacy, potency) of these proteins. Introduction of any of these fusion constructs into mammalian cells is expected to express the FVIII protein with an N-terminal XTEN fusion (signal peptide-XTEN-/FXI/-BDD FVIII), in which the fused XTEN peptide can be subsequently cleaved by FXI, generating the BDD FVIII protein.

### Example 19

### Construction of BDD FVIII with Interdomain XTEN Insertion

[0610] Construction of BDD FVIII Expression Vectors with an XTEN Insertion at the A2-B Domain Boundaries

[0611] The pBC0027 construct (pMK-BDD FVIII-STOP) is a cloning vector designed to contain the BDD FVIII protein coding sequences, but not a promoter positioned to initiate the expression of BDD FVIII. This construct is used for manipulation of the coding sequences of BDD FVIII as the vector backbone contains very few restriction enzyme sites. therefore allowing easy cloning strategies. The BDD FVIII proteins contain 1457 amino acids at a total molecular weight of 167539.66. There are 6 domains within the wild-type FVIII protein, the A1, A2, B, A3, C1 and C2 domains. In the BDD FVIII protein, most of the B domain has been deleted as it is believed to be an unstructured domain and the removal of the domain does not alter critical functions of this protein. However, the B domain boundaries seem to be excellent positions for creating XTEN fusions to allow extension of the protein half lives.

[0612] Within the pBC0027 construct, there is a unique HindIII restriction enzyme site at the boundary of A2-B junction. The XTEN (e.g., sequences of Tables 4, or 8-12) are amplified using primers that introduce a HindIII and FXI cleavage site on either end of the XTEN coding sequence. The fused XTEN sequence can be altered by amplifying various XTEN fragments. Various XTEN fusions can increase the half lives of these proteins differently, allowing modification of the properties (e.g. efficacy, potency) of these proteins. The HindIII-/FXI/-XTEN-/FXI/-HindIII fragment is digested with HindIII and ligated with HindIII digested pBC0027. The ligated DNA mixture is used to transform DH5a bacterial cells. Transformants are screened by DNA miniprep and the desired constructs are confirmed by DNA sequencing. The final construct is designated pBC0054, which encodes the BDD FVIII protein with an interdomain XTEN fusion (FVIII(A1-A2)-/FXI/-XTEN-/FXI/-FVIII(C1-C2)) but not a promoter to initiate gene expression.

[0613] The pBC0054 construct is digested with NheI/SalI, and ligated with NheI/SalI digested CET1019-HS vector (Millipore). The CET1019-HS vector contains a human CMV promoter and a UCOE sequence to facilitate gene expression. The ligated DNA mixture is used to transform DH5a bacterial cells. Transformants are screened by DNA miniprep and the desired constructs are confirmed by DNA sequencing. The final construct is designated pBC0055 (CET1019-HS-FVIII(A1-A2)-/FXI/-XTEN-/FXI/-FVIII(C1-C2)), which encodes the BDD FVIII protein with an interdomain (inter-A2/B domain) XTEN fusion (FVIII(A1-A2)-/FXI/-XTEN-/FXI/-FVIII(C1-C2)) under the control of a human CMV promoter. Introduction of the pBC0055 construct into mammalian cells is expected to express the BDD FVIII protein with an interdomain XTEN fusion (FVIII(A1-A2)-/FXI/-XTEN-/FXI/-FVIII(C1-C2)), which could be subsequently cleaved by FXI, therefore liberating the BDD FVIII protein.

[0614] Construction of BDD FVIII Expression Vectors with an XTEN Insertion at the A1-A2 Domain Boundaries

[0615] The pBC0027 construct is designed as a template for two PCR reactions using the following four primers:

(Reaction I)
5′-ATGATGGCATGGAAGCCTAT-3′;
5′-ATCCCTCACCTTCGCCAGAACCTTCAGAACCCTCACCTTCAGAACC
TTCACCAGAACCTTCACCATCTTCCGCTTCTTCATTATTTTTCAT-3′.
(Reaction II)
5′-TTCTGGCGAAGGTGAGGGATCTGAAGGCGGTTCTGAAGGTGAAGGTG
GCTCTGAGGGTTCCGAATATGATGATGATCTTACTGATTCTGAAAT-3′;
5′-TATTCTCTGTGAGGTACCAGC-3′.

[0616] The PCR products generated are 150 bps and 800 bps respectively. The 800 bp product is used as the template for the next round of PCR reaction with the 150 bp product as one primer and 5′-TATTCTCTGTGAGGTACCAGC-3′ as the other. The product for the second round of PCR is 930 bps and is digested with PshAI and ACC65I restriction enzymes. This PshAI/Acc65I flanked DNA fragment is ligated with PshAI/Acc65I digested pBC0027. The ligated DNA mixture is used to transform DH5a bacterial cells. Transformants is screened by DNA miniprep and the desired constructs are confirmed by DNA sequencing. The final construct is designated pBC0058 (pMK-BDD FVIII-D345-XTEN_Y36), which encodes the BDD FVIII protein with an interdomain (inter-A1/A2 domain) XTEN fusion after the D345 residue.

[0617] The pBC0058 construct is digested with NheI/SalI, and ligated with NheI/SalI digested CET1019-HS vector (Millipore). The CET1019-HS vector contains a human CMV promoter and a UCOE sequence to facilitate gene expression. The ligated DNA mixture is used to transform DH5a bacterial cells. Transformants are screened by DNA miniprep and the desired constructs are confirmed by DNA sequencing. The final construct is designated pBC0059 (CET1019-HS-BDD FVIII D345-XTEN_Y36), which encodes the BDD FVIII protein with an interdomain (inter-A1/A2 domain) XTEN fusion after the D345 residue under the control of a human CMV promoter. Introduction of the pBC0059 construct into mammalian cells is expected to express the BDD FVIII protein with an interdomain XTEN fusion (BDD FVIII D345-XTEN_Y36).

### Example 20

### Construction of FVIII with Intradomain XTEN Insertion

[0618] Construction of BDD FVIII Expression Vectors with an XTEN Insertion after P598 (within the A2 Domain)

[0619] The coding sequences for XTEN_Y36 is amplified using PCR techniques with the following primers:

5′-GAAGCTGGTACCTCACAGAGAATATACAACGCTTTCTCCCCAATCCA
GGTGAAGGTTCTGGTGAAGG-3′
5′-AACTCTGGATCCTCAAGCTGCACTCCAGCTTCGGAACCCTCAGAG
CC-3′.

[0620] The 184 bp PCR product is flanked by the KpnI and BamHI restriction enzyme sites on either end, and is ligated to KpnII/BamHI digested pBC0027 vector which encodes the BDD FVIII gene. The ligated DNA mixture is used to transform DH5a bacterial cells. Transformants are screened by DNA miniprep and the desired constructs are confirmed by DNA sequencing. The final construct is designated pBC0056, which contains DNA sequences encoding the FVIII protein with an XTEN_Y36 fusion after the P598 residue. This cloning strategy is used to introduce various forms of XTEN into the BDD FVIII protein by altering the template for the PCR reaction and changing the primers accordingly.

[0621] The pBC0056 construct is digested with NheI/SalI, and ligated with NheI/SalI digested CET1019-HS vector (Millipore). The CET1019-HS vector contains a human CMV promoter and a UCOE sequence to facilitate gene expression. The ligated DNA mixture is used to transform DH5a bacterial cells. Transformants are screened by DNA miniprep and the desired constructs are confirmed by DNA sequencing. The final construct is designated pBC0057 (CET1019-HS-FVIII P598-XTEN_Y32), which encodes the BDD FVIII protein with an intradomain (within A2 domain) XTEN fusion under the control of a human CMV promoter. Introduction of the pBC0057 construct into mammalian cells is expected to express the BDD FVIII protein with an intradomain XTEN fusion (FVIII P598-XTEN_Y32).

[0622] Construction of BDD FVIII Expression Vectors with Other Intradomain XTEN Insertions

[0623] To introduce various XTEN segments into other intradomain sites within BDD FVIII (e.g., the XTEN of Tables 4, or 8-12), primers are designed that amplify XTEN with an overhang that can anneal with BDD FVIII. The coding sequence of FVIII (pMK-BDD FVIII) is designed with various unique restriction enzyme sites to allow these specific insertions. The unique restriction enzymes are listed below with their cut site: NheI 376, Sad 391, AfiII 700, SpeI 966, PshAI 1417, Acc6512192, KpnI 2192, BamHI 2250, HindIII 2658, PfoI 2960, PflMI 3413, ApaI 3893, Bsp1201 3893, SwaI 4265, OliI 4626, XbaI 4644, BstBI 4673, SalI 4756, and XhoI 4762. The NheI and SalI sites on either end of the coding sequence are used to insert the DNA fragment into a human CMV promoter driven vector, the CET1019-HS (Millipore) for expression in mammalian cells. These constructs are expected to express the BDD FVIII protein with an XTEN fusion.

TABLE 14
DNA and Amino Acid Sequences of FVIII-XTEN Constructs

| Con- | | |
|---|---|---|
| struct | | |
| Name | Amino acid sequence | Nucleotide sequence |
| pBC0100 | MAYTDETFKTREAIQ | ATGGCATACACAGATGAAACCTTTAAGACTCGTGAAGCTATTC |
| | HESGILGPLLYGEVG | AGCATGAATCAGGAATCTTGGGACCTTTACTTTATGGGGAAGT |
| | DTLLIIFKNQASRPYN | TGGAGACACACTGTTGATTATATTTAAGAATCAAGCAAGCAGA |
| | IYPHGITDVRPLYSRR | CCATATAACATCTACCCTCACGGAATCACTGATGTCCGTCCTTT |
| | LPKGVKHLKDFPILPG | GTATTCAAGGAGATTACCAAAAGGTGTAAAACATTTGAAGGA |
| | EIFKYKWTVTVEDGP | TTTTCCAATTCTGCCAGGAGAAATATTCAAATATAAATGGACA |
| | TKSDPRCLTRYYSSF | GTGACTGTAGAAGATGGGCCAACTAAATCAGATCCTCGGTGCC |
| | VNMERDLASGLIGPL | TGACCCGCTATTACTCTAGTTTCGTTAATATGGAGAGAGATCT |
| | LICYKESVDQRGNQI | AGCTTCAGGACTCATTGGCCCTCTCCTCATCTGCTACAAAGAA |
| | MSDKRNVILFSVFDE | TCTGTAGATCAAAGAGGAAACCAGATAATGTCAGACAAGAGG |
| | NRSWYLTENIQRFLP | AATGTCATCCTGTTTTCTGTATTTGATGAGAACCGAAGCTGGT |
| | NPAGVQLEDPEFQAS | ACCTCACAGAGAATATACAACGCTTTCTCCCCAATCCAGCTGG |
| | NIMHSINGYVFDSLQ | AGTGCAGCTTGAGGATCCAGAGTTCCAAGCCTCCAACATCATG |
| | LSVCLHEVAYWYILSI | CACAGCATCAATGGCTATGTTTTTGATAGTTTGCAGTTGTCAGT |
| | GAQTDFLSVFFSGYT | TTGTTTGCATGAGGTGGCATACTGGTACATTCTAAGCATTGGA |
| | FKHKMVYEDTLTLFP | GCACAGACTGACTTCCTTTCTGTCTTCTTCTCTGGATATACCTT |
| | FSGETVFMSMENPGL | CAAACACAAAATGGTCTATGAAGACACACTCACCCTATTCCCA |
| | WILGCHNSDFRNRG | TTCTCAGGAGAAACTGTCTTCATGTCGATGGAAAACCCAGGTC |
| | MTALLKVSSCDKNTG | TATGGATTCTGGGGTGCCACAACTCAGACTTTCGGAACAGAGG |
| | DYYEDSYEDISAYLL | CATGACCGCCTTACTGAAGGTTTCTAGTTGTGACAAGAACACT |
| | SKNNAIEPRSFSQNPP | GGTGATTATTACGAGGACAGTTATGAAGATATTTCAGCATACT |
| | VLKRHQREITRTTLQS | TGCTGAGTAAAAACAATGCCATTGAACCAAGAAGCTTCTCTCA |
| | DQEEIDYDDTISVEM | AAACCCACCAGTCTTGAAACGCCATCAACGGGAAATAACTCG |
| | KKEDFDIYDEDENQS | TACTACTCTTCAGTCAGATCAAGAGGAAATTGACTATGATGAT |
| | PRSFQKKTRHYFIAA | ACCATATCAGTTGAAATGAAGAAGGAAGATTTTGACATTTATG |
| | VERLWDYGMSSSPH | ATGAGGATGAAAATCAGAGCCCCCGCAGCTTTCAAAAGAAAA |
| | VLRNRAQSGSVPQFK | CACGACACTATTTTATTGCTGCAGTGGAGAGGCTCTGGGATTA |
| | KVVFQEFTDGSFTQP | TGGGATGAGTAGCTCCCCACATGTTCTAAGAAACAGGGCTCAG |
| | LYRGELNEHLGLLGP | AGTGGCAGTGTCCCTCAGTTCAAGAAAGTTGTTTTCCAGGAAT |
| | YIRAEVEDNIMVTFR | TTACTGATGGCTCCTTTACTCAGCCCTTATACCGTGGAGAACT |
| | NQASRPYSFYSSLISY | AAATGAACATTTGGGACTCCTGGGGCCATATATAAGAGCAGA |
| | EEDQRQGAEPRKNFV | AGTTGAAGATAATATCATGGTAACTTTCAGAAATCAGGCCTCT |
| | KPNETKTYFWKVQH | CGTCCCTATTCCTTCTATTCTAGCCTTATTTCTTATGAGGAAGA |
| | HMAPTKDEFDCKAW | TCAGAGGCAAGGAGCAGAACCTAGAAAAAACTTTGTCAAGCC |
| | AYFSDVDLEKDVHSG | TAATGAAACCAAAACTTACTTTTGGAAAGTGCAACATCATATG |
| | LIGPLLVCHTNTLNPA | GCACCCACTAAAGATGAGTTTGACTGCAAAGCCTGGGCTTATT |
| | HGRQVTVQEFALFFTI | TCTCTGATGTTGACCTGGAAAAAGATGTGCACTCAGGCCTGAT |
| | FDETKSWYFTENMER | TGGACCCCTTCTGGTCTGCCACACTAACACACTGAACCCTGCT |
| | NCRAPCNIQMEDPTF | CATGGGAGACAAGTGACAGTACAGGAATTTGCTCTGTTTTTCA |
| | KENYRFHAINGYIMD | CCATCTTTGATGAGACCAAAAGCTGGTACTTCACTGAAAATAT |
| | TLPGLVMAQDQRIR | GGAAAGAAACTGCAGGGCTCCCTGCAATATCCAGATGGAAGA |
| | WYLLSMGSNENIHSI | TCCCACTTTTAAAGAGAATTATCGCTTCCATGCAATCAATGGC |
| | HFSGHVFTVRKKEEY | TACATAATGGATACACTACCTGGCTTAGTAATGGCTCAGGATC |
| | KMALYNLYPGVFET | AAAGGATTCGATGGTATCTGCTCAGCATGGGCAGCAATGAAA |
| | VEMLPSKAGIWRVEC | ACATCCATTCTATTCATTTCAGTGGACATGTGTTCACTGTACGA |
| | LIGEHLHAGMSTLFL | AAAAAAGAGGAGTATAAAATGGCACTGTACAATCTCTATCCA |
| | VYSNKCQTPLGMAS | GGTGTTTTTGAGACAGTGGAAATGTTACCATCCAAAGCTGGAA |
| | GHIRDFQITASGQYG | TTTGGCGGGTGGAATGCCTTATTGGCGAGCATCTACATGCTGG |
| | QWAPKLARLHYSGSI | GATGAGCACACTTTTTCTGGTGTACAGCAATAAGTGTCAGACT |
| | NAWSTKEPFSWIKVD | CCCCTGGGAATGGCTTCTGGACACATTAGAGATTTTCAGATTA |
| | LLAPMIIHGIKTQGAR | CAGCTTCAGGACAATATGGACAGTGGGCCCCAAAGCTGGCCA |
| | QKFSSLYISQFIIMYSL | GACTTCATTATTCCGGATCAATCAATGCCTGGAGCACCAAGGA |
| | DGKKWQTYRGNSTG | GCCCTTTTCTTGGATCAAGGTGGATCTGTTGGCACCAATGATT |
| | TLMVFFGNVDSSGIK | ATTCACGGCATCAAGACCCAGGGTGCCCGTCAGAAGTTCTCCA |
| | HNIFNPPIIARYIRLHP | GCCTCTACATCTCTCAGTTTATCATCATGTATAGTCTTGATGGG |
| | THYSIRSTLRMELMG | AAGAAGTGGCAGACTTATCGAGGAAATTCCACTGGAACCTTA |
| | CDLNSCSMPLGMESK | ATGGTCTTCTTTGGCAATGTGGATTCATCTGGGATAAAACACA |
| | AISDAQITASSYFTNM | ATATTTTTAACCCTCCAATTATTGCTCGATACATCCGTTTGCAC |
| | FATWSPSKARLHLQG | CCAACTCATTATAGCATTCGCAGCACTCTTCGCATGGAGTTGA |
| | RSNAWRPQVNNPKE | TGGGCTGTGATTTAAATAGTTGCAGCATGCCATTGGGAATGGA |
| | WLQVDFQKTMKVTG | GAGTAAAGCAATATCAGATGCACAGATTACTGCTTCATCCTAC |
| | VTTQGVKSLLTSMYV | TTTACCAATATGTTTGCCACCTGGTCTCCTTCAAAAGCTCGACT |
| | KEFLISSSQDGHQWT | TCACCTCCAAGGGAGGAGTAATGCCTGGAGACCTCAGGTGAA |
| | LFFQNGKVKVFQGN | TAATCCAAAAGAGTGGCTGCAAGTGGACTTCCAGAAGACAAT |
| | QDSFTPVVNSLDPPLL | GAAAGTCACAGGAGTAACTACTCAGGGAGTAAAATCTCTGCTT |
| | TRYLRIHPQSWVHQI | ACCAGCATGTATGTGAAGGAGTTCCTCATCTCCAGCAGTCAAG |
| | ALRMEVLGCEAQDLY | ATGGCCATCAGTGGACTCTCTTTTTTCAGAATGGCAAAGTAAA |
| | | GGTTTTTCAGGGAAATCAAGACTCCTTCACACCTGTGGTGAAC |
| | | TCTCTAGACCCACCGTTACTGACTCGCTACCTTCGAATTCACCC |
| | | CCAGAGTTGGGTGCACCAGATTGCCCTGAGGATGGAGGTTCTG |
| | | GGCTGCGAGGCACAGGACCTCTACTGA |
| pBC0114 | MQIELSTCFFLCLLRF | ATGCAAATAGAGCTCTCCACCTGCTTCTTTCTGTGCCTTTTGCG |
| | CFSATRRYYLGAVEL | ATTCTGCTTTAGTGCCACCAGAAGATACTACCTGGGTGCAGTG |
| | SWDYMQSDLGELPV | GAACTGTCATGGGACTATATGCAAAGTGATCTCGGTGAGCTGC |
| | DARFPPRVPKSFPFNT | CTGTGGACGCAAGATTTCCTCCTAGAGTGCCAAAATCTTTTCC |
| | SVVYKKTLFVEFTDH | ATTCAACACCTCAGTCGTGTACAAAAAGACTCTGTTTGTAGAA |
| | LFNIAKPRPPWMGLL | TTCACGGATCACCTTTTCAACATCGCTAAGCCAAGGCCACCCT |
| | GPTIQAEVYDTVVITL | GGATGGGTCTGCTAGGTCCTACCATCCAGGCTGAGGTTTATGA |
| | KNMASHPVSLHAVG | TACAGTGGTCATTACACTTAAGAACATGGCTTCCCATCCTGTC |
| | VSYWKASEGAEYDD | AGTCTTCATGCTGTTGGTGTATCCTACTGGAAAGCTTCTGAGG |
| | QTSQREKEDDKVFPG | GAGCTGAATATGATGATCAGACCAGTCAAAGGGAGAAAGAAG |
| | GSHTYVWQVLKENG | ATGATAAAGTCTTCCCTGGTGGAAGCCATACATATGTCTGGCA |
| | PMASDPLCLTYSYLS | GGTCCTGAAAGAGAATGGTCCAATGGCCTCTGACCCACTGTGC |
| | HVDLVKDLNSGLIGA | CTTACCTACTCATATCTTTCTCATGTGGACCTGGTAAAAGACTT |
| | LLVCREGSLAKEKTQ | GAATTCAGGCCTCATTGGAGCCCTACTAGTATGTAGAGAAGGG |
| | TLHKFILLFAVFDEGK | AGTCTGGCCAAGGAAAAGACACAGACCTTGCACAAATTTATA |
| | SWHSETKNSLMQDR | CTACTTTTTGCTGTATTTGATGAAGGGAAAAGTTGGCACTCAG |
| | DAASARAWPKMHTV | AAACAAAGAACTCCTTGATGCAGGATAGGGATGCTGCATCTG |
| | NGYVNRSLPGLIGCH | CTCGGGCCTGGCCTAAAATGCACACAGTCAATGGTTATGTAAA |
| | RKSVYWHVIGMGTT | CAGGTCTCTGCCAGGTCTGATTGGATGCCACAGGAAATCAGTC |
| | PEVHSIFLEGHTFLVR | TATTGGCATGTGATTGGAATGGGCACCACTCCTGAAGTGCACT |
| | NHRQASLEISPITFLT | CAATATTCCTCGAAGGTCACACATTTCTTGTGAGGAACCATCG |
| | AQTLLMDLGQFLLFC | CCAGGCTAGCTTGGAAATCTCGCCAATAACTTTCCTTACTGCT |
| | HISSHQHDGMEAYVK | CAAACACTCTTGATGGACCTTGGACAGTTTCTACTGTTTTGTCA |
| | VDSCPEEPQLRMKNN | TATCTCTTCCCACCAACATGATGGCATGGAAGCTTATGTCAAA |
| | EEAEDYDDDLTDSEM | GTAGACAGCTGTCCAGAGGAACCCCAACTACGAATGAAAAAT |
| | DVVRFDDDNSPSFIQI | AATGAAGAAGCGGAAGACTATGATGATGATCTTACTGATTCTG |
| | RSVAKKHPKTWVHYI | AAATGGATGTGGTCAGGTTTGATGATGACAACTCTCCTTCCTT |
| | AAEEEDWDYAPLVL | TATCCAAATTCGCTCAGTTGCCAAGAAGCATCCTAAAACTTGG |
| | APDDRSYKSQYLNNG | GTACATTACATTGCTGCTGAAGAGGAGGACTGGGACTATGCTC |
| | PQRIGRKYKKVRFMA | CCTTAGTCCTCGCCCCCGATGACAGAAGTTATAAAAGTCAATA |
| | YTDETFKTREAIQHES | TTTGAACAATGGCCCTCAGCGGATTGGTAGGAAGTACAAAAA |
| | GILGPLLYGEVGDTL | AGTCCGATTTATGGCATACACAGATGAAACCTTTAAGACTCGT |
| | LIIFKNQASRPYNIYP | GAAGCTATTCAGCATGAATCAGGAATCTTGGGACCTTTACTTT |
| | HGITDVRPLYSRRLPK | ATGGGGAAGTTGGAGACACACTGTTGATTATATTTAAGAATCA |
| | GVKHLKDFPILPGEIF | AGCAAGCAGACCATATAACATCTACCCTCACGGAATCACTGAT |
| | KYKWTVTVEDGPTK | GTCCGTCCTTTGTATTCAAGGAGATTACCAAAAGGTGTAAAAC |
| | SDPRCLTRYYSSFVN | ATTTGAAGGATTTTCCAATTCTGCCAGGAGAAATATTCAAATA |
| | MERDLASGLIGPLLIC | TAAATGGACAGTGACTGTAGAAGATGGGCCAACTAAATCAGA |
| | YKESVDQRGNQIMSD | TCCTCGGTGCCTGACCCGCTATTACTCTAGTTTCGTTAATATGG |
| | KRNVILFSVFDENRS | AGAGAGATCTAGCTTCAGGACTCATTGGCCCTCTCCTCATCTG |
| | WYLTENIQRFLPNPA | CTACAAAGAATCTGTAGATCAAAGAGGAAACCAGATAATGTC |
| | GVQLEDPEFQASNIM | AGACAAGAGGAATGTCATCCTGTTTTCTGTATTTGATGAGAAC |
| | HSINGYVFDSLQLSV | CGAAGCTGGTACCTCACAGAGAATATACAACGCTTTCTCCCCA |
| | CLHEVAYWYILSIGA | ATCCAGCTGGAGTGCAGCTTGAGGATCCAGAGTTCCAAGCCTC |
| | QTDFLSVFFSGYTFK | CAACATCATGCACAGCATCAATGGCTATGTTTTTGATAGTTTG |
| | HKMVYEDTLTLFPFS | CAGTTGTCAGTTTGTTTGCATGAGGTGGCATACTGGTACATTCT |
| | GETVFMSMENPGLWI | AAGCATTGGAGCACAGACTGACTTCCTTTCTGTCTTCTTCTCTG |
| | LGCHNSDFRNRGMT | GATATACCTTCAAACACAAAATGGTCTATGAAGACACACTCAC |
| | ALLKVSSCDKNTGDY | CCTATTCCCATTCTCAGGAGAAACTGTCTTCATGTCGATGGAA |
| | YEDSYEDISAYLLSK | AACCCAGGTCTATGGATTCTGGGGTGCCACAACTCAGACTTTC |
| | NNAIEPRSFSQNPPVL | GGAACAGAGGCATGACCGCCTTACTGAAGGTTTCTAGTTGTGA |
| | KRHQREITRTTLQSD | CAAGAACACTGGTGATTATTACGAGGACAGTTATGAAGATATT |
| | QEEIDYDDTISVEMK | TCAGCATACTTGCTGAGTAAAAACAATGCCATTGAACCAAGA |
| | KEDFDIYDEDENQSP | AGCTTCTCTCAAAACCCACCAGTCTTGAAACGCCATCAACGGG |
| | RSFQKKTRHYFIAAV | AAATAACTCGTACTACTCTTCAGTCAGATCAAGAGGAAATCGA |
| | ERLWDYGMSSSPHVL | TTATGATGATACCATATCAGTTGAAATGAAGAAGGAAGATTTT |
| | RNRAQSGSVPQFKKV | GACATTTATGATGAGGATGAAAATCAGAGCCCCCGCAGCTTTC |
| | VFQEFTDGSFTQPLY | AAAAGAAAACACGACACTATTTTATTGCTGCAGTGGAGAGGC |
| | RGELNEHLGLLGPYI | TCTGGGATTATGGGATGAGTAGCTCCCCACATGTTCTAAGAAA |
| | RAEVEDNIMVTFRNQ | CAGGGCTCAGAGTGGCAGTGTCCCTCAGTTCAAGAAAGTTGTT |
| | ASRPYSFYSSLISYEE | TTCCAGGAATTTACTGATGGCTCCTTTACTCAGCCCTTATACCG |
| | DQRQGAEPRKNFVKP | TGGAGAACTAAATGAACATTTGGGACTCCTGGGGCCATATATA |
| | NETKTYFWKVQHHM | AGAGCAGAAGTTGAAGATAATATCATGGTAACTTTCAGAAAT |
| | APTKDEFDCKAWAY | CAGGCCTCTCGTCCCTATTCCTTCTATTCTAGCCTTATTTCTTAT |
| | FSDVDLEKDVHSGLI | GAGGAAGATCAGAGGCAAGGAGCAGAACCTAGAAAAAACTTT |
| | GPLLVCHTNTLNPAH | GTCAAGCCTAATGAAACCAAAACTTACTTTTGGAAAGTGCAAC |
| | GRQVTVQEFALFFTIF | ATCATATGGCACCCACTAAAGATGAGTTTGACTGCAAAGCCTG |
| | DETKSWYFTENMER | GGCTTATTTCTCTGATGTTGACCTGGAAAAAGATGTGCACTCA |
| | NCRAPCNIQMEDPTF | GGCCTGATTGGACCCCTTCTGGTCTGCCACACTAACACACTGA |
| | KENYRFHAINGYIMD | ACCCTGCTCATGGGAGACAAGTGACAGTACAGGAATTTGCTCT |
| | TLPGLVMAQDQRIR | GTTTTTCACCATCTTTGATGAGACCAAAAGCTGGTACTTCACT |
| | WYLLSMGSNENIHSI | GAAAATATGGAAAGAAACTGCAGGGCTCCCTGCAATATCCAG |
| | HFSGHVFTVRKKEEY | ATGGAAGATCCCACTTTTAAAGAGAATTATCGCTTCCATGCAA |
| | KMALYNLYPGVFET | TCAATGGCTACATAATGGATACACTACCTGGCTTAGTAATGGC |
| | VEMLPSKAGIWRVEC | TCAGGATCAAAGGATTCGATGGTATCTGCTCAGCATGGGCAGC |
| | LIGEHLHAGMSTLFL | AATGAAAACATCCATTCTATTCATTTCAGTGGACATGTGTTCA |
| | VYSNKCQTPLGMAS | CTGTACGAAAAAAAGAGGAGTATAAAATGGCACTGTACAATC |
| | GHIRDFQITASGQYG | TCTATCCAGGTGTTTTTGAGACAGTGGAAATGTTACCATCCAA |
| | QWAPKLARLHYSGSI | AGCTGGAATTTGGCGGGTGGAATGCCTTATTGGCGAGCATCTA |
| | NAWSTKEPFSWIKVD | CATGCTGGGATGAGCACACTTTTTCTGGTGTACAGCAATAAGT |
| | LLAPMIIHGIKTQGAR | GTCAGACTCCCCTGGGAATGGCTTCTGGACACATTAGAGATTT |
| | QKFSSLYISQFIIMYSL | TCAGATTACAGCTTCAGGACAATATGGACAGTGGGCCCCAAA |
| | DGKKWQTYRGNSTG | GCTGGCCAGACTTCATTATTCCGGATCAATCAATGCCTGGAGC |
| | TLMVFFGNVDSSGIK | ACCAAGGAGCCCTTTTCTTGGATCAAGGTGGATCTGTTGGCAC |
| | HNIFNPPIIARYIRLHP | CAATGATTATTCACGGCATCAAGACCCAGGGTGCCCGTCAGAA |
| | THYSIRSTLRMELMG | GTTCTCCAGCCTCTACATCTCTCAGTTTATCATCATGTATAGTC |
| | CDLNSCSMPLGMESK | TTGATGGGAAGAAGTGGCAGACTTATCGAGGAAATTCCACTG |
| | AISDAQITASSYFTNM | GAACCTTAATGGTCTTCTTTGGCAATGTGGATTCATCTGGGAT |
| | FATWSPSKARLHLQG | AAAACACAATATTTTTAACCCTCCAATTATTGCTCGATACATC |
| | RSNAWRPQVNNPKE | CGTTTGCACCCAACTCATTATAGCATTCGCAGCACTCTTCGCAT |
| | WLQVDFQKTMKVTG | GGAGTTGATGGGCTGTGATTTAAATAGTTGCAGCATGCCATTG |
| | VTTQGVKSLLTSMYV | GGAATGGAGAGTAAAGCAATATCAGATGCACAGATTACTGCT |
| | KEFLISSSQDGHQWT | TCATCCTACTTTACCAATATGTTTGCCACCTGGTCTCCTTCAAA |
| | LFFQNGKVKVFQGN | AGCTCGACTTCACCTCCAAGGGAGGAGTAATGCCTGGAGACCT |
| | QDSFTPVVNSLDPPLL | CAGGTGAATAATCCAAAAGAGTGGCTGCAAGTGGACTTCCAG |
| | TRYLRIHPQSWVHQI | AAGACAATGAAAGTCACAGGAGTAACTACTCAGGGAGTAAAA |
| | ALRMEVLGCEAQDL | TCTCTGCTTACCAGCATGTATGTGAAGGAGTTCCTCATCTCCA |
| | YGAGSPGAETAEQKL | GCAGTCAAGATGGCCATCAGTGGACTCTCTTTTTTCAGAATGG |
| | ISEEDLSPATG | CAAAGTAAAGGTTTTTCAGGGAAATCAAGACTCCTTCACACCT |
| | | GTGGTGAACTCTCTAGACCCACCGTTACTGACTCGCTACCTTC |
| | | GAATTCACCCCCAGAGTTGGGTGCACCAGATTGCCCTGAGGAT |
| | | GGAGGTTCTGGGCTGCGAGGCACAGGACCTCTACGGCGCCGG |
| | | ATCACCTGGGGCCGAAACGGCCGAACAAAAACTCATCTCAGA |
| | | AGAGGATCTGTCACCTGCAACCGGTTGA |
| pBC0126 | MQIELSTCFFLCLLRF | ATGCAAATAGAGCTCTCCACCTGCTTCTTTCTGTGCCTTTTGCG |
| | CFSATRGAPGSPAGS | ATTCTGCTTTAGTGCCACCAGAGGCGCGCCAGGTTCTCCTGCT |
| | PTSTEEGTSESATPES | GGCTCCCCCACCTCAACAGAAGAGGGGACAAGCGAAAGCGCT |
| | GPGSEPATSGSETPAS | ACGCCTGAGAGTGGCCCTGGCTCTGAGCCAGCCACCTCCGGCT |
| | SRYYLGAVELSWDY | CTGAAACCCCTGCCTCGAGCAGATACTACCTGGGTGCAGTGGA |
| | MQSDLGELPVDARFP | ACTGTCATGGGACTATATGCAAAGTGATCTCGGTGAGCTGCCT |
| | PRVPKSFPFNTSVVY | GTGGACGCAAGATTTCCTCCTAGAGTGCCAAAATCTTTTCCAT |
| | KKTLFVEFTDHLFNIA | TCAACACCTCAGTCGTGTACAAAAAGACTCTGTTTGTAGAATT |
| | KPRPPWMGLLGPTIQ | CACGGATCACCTTTTCAACATCGCTAAGCCAAGGCCACCCTGG |
| | AEVYDTVVITLKNMA | ATGGGTCTGCTAGGTCCTACCATCCAGGCTGAGGTTTATGATA |
| | SHPVSLHAVGVSYW | CAGTGGTCATTACACTTAAGAACATGGCTTCCCATCCTGTCAG |
| | KASEGAEYDDQTSQR | TCTTCATGCTGTTGGTGTATCCTACTGGAAAGCTTCTGAGGGA |
| | EKEDDKVFPGGSHTY | GCTGAATATGATGATCAGACCAGTCAAAGGGAGAAAGAAGAT |
| | VWQVLKENGPMASD | GATAAAGTCTTCCCTGGTGGAAGCCATACATATGTCTGGCAGG |
| | PLCLTYSYLSHVDLV | TCCTGAAAGAGAATGGTCCAATGGCCTCTGACCCACTGTGCCT |
| | KDLNSGLIGALLVCR | TACCTACTCATATCTTTCTCATGTGGACCTGGTAAAAGACTTG |
| | EGSLAKEKTQTLHKFI | AATTCAGGCCTCATTGGAGCCCTACTAGTATGTAGAGAAGGGA |
| | LLFAVFDEGKSWHSE | GTCTGGCCAAGGAAAAGACACAGACCTTGCACAAATTTATACT |
| | TKNSLMQDRDAASA | ACTTTTTGCTGTATTTGATGAAGGGAAAAGTTGGCACTCAGAA |
| | RAWPKMHTVNGYVN | ACAAAGAACTCCTTGATGCAGGATAGGGATGCTGCATCTGCTC |
| | RSLPGLIGCHRKSVY | GGGCCTGGCCTAAAATGCACACAGTCAATGGTTATGTAAACA |
| | WHVIGMGTTPEVHSI | GGTCTCTGCCAGGTCTGATTGGATGCCACAGGAAATCAGTCTA |
| | FLEGHTFLVRNHRQA | TTGGCATGTGATTGGAATGGGCACCACTCCTGAAGTGCACTCA |
| | SLEISPITFLTAQTLLM | ATATTCCTCGAAGGTCACACATTTCTTGTGAGGAACCATCGCC |
| | DLGQFLLFCHISSHQH | AGGCTAGCTTGGAAATCTCGCCAATAACTTTCCTTACTGCTCA |
| | DGMEAYVKVDSCPE | AACACTCTTGATGGACCTTGGACAGTTTCTACTGTTTTGTCATA |
| | EPQLRMKNNEEAED | TCTCTTCCCACCAACATGATGGCATGGAAGCTTATGTCAAAGT |
| | YDDDLTDSEMDVVR | AGACAGCTGTCCAGAGGAACCCCAACTACGAATGAAAAATAA |
| | FDDDNSPSFIQIRSVA | TGAAGAAGCGGAAGACTATGATGATGATCTTACTGATTCTGAA |
| | KKHPKTWVHYIAAEE | ATGGATGTGGTCAGGTTTGATGATGACAACTCTCCTTCCTTTAT |
| | EDWDYAPLVLAPDD | CCAAATTCGCTCAGTTGCCAAGAAGCATCCTAAAACTTGGGTA |
| | RSYKSQYLNNGPQRI | CATTACATTGCTGCTGAAGAGGAGGACTGGGACTATGCTCCCT |
| | GRKYKKVRFMAYTD | TAGTCCTCGCCCCCGATGACAGAAGTTATAAAAGTCAATATTT |
| | ETFKTREAIQHESGIL | GAACAATGGCCCTCAGCGGATTGGTAGGAAGTACAAAAAAGT |
| | GPLLYGEVGDTLLIIF | CCGATTTATGGCATACACAGATGAAACCTTTAAGACTCGTGAA |
| | KNQASRPYNIYPHGIT | GCTATTCAGCATGAATCAGGAATCTTGGGACCTTTACTTTATG |
| | DVRPLYSRRLPKGVK | GGGAAGTTGGAGACACACTGTTGATTATATTTAAGAATCAAGC |
| | HLKDFPILPGEIFKYK | AAGCAGACCATATAACATCTACCCTCACGGAATCACTGATGTC |
| | WTVTVEDGPTKSDPR | CGTCCTTTGTATTCAAGGAGATTACCAAAAGGTGTAAAACATT |
| | CLTRYYSSFVNMERD | TGAAGGATTTTCCAATTCTGCCAGGAGAAATATTCAAATATAA |
| | LASGLIGPLLICYKES | ATGGACAGTGACTGTAGAAGATGGGCCAACTAAATCAGATCC |
| | VDQRGNQIMSDKRN | TCGGTGCCTGACCCGCTATTACTCTAGTTTCGTTAATATGGAG |
| | VILFSVFDENRSWYL | AGAGATCTAGCTTCAGGACTCATTGGCCCTCTCCTCATCTGCT |
| | TENIQRFLPNPAGVQL | ACAAAGAATCTGTAGATCAAAGAGGAAACCAGATAATGTCAG |
| | EDPEFQASNIMHSING | ACAAGAGGAATGTCATCCTGTTTTCTGTATTTGATGAGAACCG |
| | YVFDSLQLSVCLHEV | AAGCTGGTACCTCACAGAGAATATACAACGCTTTCTCCCCAAT |
| | AYWYILSIGAQTDFLS | CCAGCTGGAGTGCAGCTTGAGGATCCAGAGTTCCAAGCCTCCA |
| | VFFSGYTFKHKMVYE | ACATCATGCACAGCATCAATGGCTATGTTTTTGATAGTTTGCA |
| | DTLTLFPFSGETVFMS | GTTGTCAGTTTGTTTGCATGAGGTGGCATACTGGTACATTCTA |
| | MENPGLWILGCHNSD | AGCATTGGAGCACAGACTGACTTCCTTTCTGTCTTCTTCTCTGG |
| | FRNRGMTALLKVSSC | ATATACCTTCAAACACAAAATGGTCTATGAAGACACACTCACC |
| | DKNTGDYYEDSYEDI | CTATTCCCATTCTCAGGAGAAACTGTCTTCATGTCGATGGAAA |
| | SAYLLSKNNAIEPRSF | ACCCAGGTCTATGGATTCTGGGGTGCCACAACTCAGACTTTCG |
| | SQNPPVLKRHQREITR | GAACAGAGGCATGACCGCCTTACTGAAGGTTTCTAGTTGTGAC |
| | TTLQSDQEEIDYDDTI | AAGAACACTGGTGATTATTACGAGGACAGTTATGAAGATATTT |
| | SVEMKKEDFDIYDED | CAGCATACTTGCTGAGTAAAAACAATGCCATTGAACCAAGAA |
| | ENQSPRSFQKKTRHY | GCTTCTCTCAAAACCCACCAGTCTTGAAACGCCATCAACGGGA |
| | FIAAVERLWDYGMSS | AATAACTCGTACTACTCTTCAGTCAGATCAAGAGGAAATCGAT |
| | SPHVLRNRAQSGSVP | TATGATGATACCATATCAGTTGAAATGAAGAAGGAAGATTTTG |
| | QFKKVVFQEFTDGSF | ACATTTATGATGAGGATGAAAATCAGAGCCCCCGCAGCTTTCA |
| | TQPLYRGELNEHLGL | AAAGAAAACACGACACTATTTTATTGCTGCAGTGGAGAGGCTC |
| | LGPYIRAEVEDNIMV | TGGGATTATGGGATGAGTAGCTCCCCACATGTTCTAAGAAACA |
| | TFRNQASRPYSFYSSL | GGGCTCAGAGTGGCAGTGTCCCTCAGTTCAAGAAAGTTGTTTT |
| | ISYEEDQRQGAEPRK | CCAGGAATTTACTGATGGCTCCTTTACTCAGCCCTTATACCGTG |
| | NFVKPNETKTYFWK | GAGAACTAAATGAACATTTGGGACTCCTGGGGCCATATATAA |
| | VQHHMAPTKDEFDC | GAGCAGAAGTTGAAGATAATATCATGGTAACTTTCAGAAATC |
| | KAWAYFSDVDLEKD | AGGCCTCTCGTCCCTATTCCTTCTATTCTAGCCTTATTTCTTATG |
| | VHSGLIGPLLVCHTN | AGGAAGATCAGAGGCAAGGAGCAGAACCTAGAAAAAACTTTG |
| | TLNPAHGRQVTVQEF | TCAAGCCTAATGAAACCAAAACTTACTTTTGGAAAGTGCAACA |
| | ALFFTIFDETKSWYFT | TCATATGGCACCCACTAAAGATGAGTTTGACTGCAAAGCCTGG |
| | ENMERNCRAPCNIQM | GCTTATTTCTCTGATGTTGACCTGGAAAAAGATGTGCACTCAG |
| | EDPTFKENYRFHAIN | GCCTGATTGGACCCCTTCTGGTCTGCCACACTAACACACTGAA |
| | GYIMDTLPGLVMAQ | CCCTGCTCATGGGAGACAAGTGACAGTACAGGAATTTGCTCTG |
| | DQRIRWYLLSMGSNE | TTTTTCACCATCTTTGATGAGACCAAAAGCTGGTACTTCACTG |
| | NIHSIHFSGHVFTVRK | AAAATATGGAAAGAAACTGCAGGGCTCCCTGCAATATCCAGA |
| | KEEYKMALYNLYPG | TGGAAGATCCCACTTTTAAAGAGAATTATCGCTTCCATGCAAT |
| | VFETVEMLPSKAGIW | CAATGGCTACATAATGGATACACTACCTGGCTTAGTAATGGCT |
| | RVECLIGEHLHAGMS | CAGGATCAAAGGATTCGATGGTATCTGCTCAGCATGGGCAGC |
| | TLFLVYSNKCQTPLG | AATGAAAACATCCATTCTATTCATTTCAGTGGACATGTGTTCA |
| | MASGHIRDFQITASG | CTGTACGAAAAAAAGAGGAGTATAAAATGGCACTGTACAATC |
| | QYGQWAPKLARLHY | TCTATCCAGGTGTTTTTGAGACAGTGGAAATGTTACCATCCAA |
| | SGSINAWSTKEPFSWI | AGCTGGAATTTGGCGGGTGGAATGCCTTATTGGCGAGCATCTA |
| | KVDLLAPMIIHGIKTQ | CATGCTGGGATGAGCACACTTTTTCTGGTGTACAGCAATAAGT |
| | GARQKFSSLYISQFII | GTCAGACTCCCCTGGGAATGGCTTCTGGACACATTAGAGATTT |
| | MYSLDGKKWQTYRG | TCAGATTACAGCTTCAGGACAATATGGACAGTGGGCCCCAAA |
| | NSTGTLMVFFGNVDS | GCTGGCCAGACTTCATTATTCCGGATCAATCAATGCCTGGAGC |
| | SGIKHNIFNPPIIARYI | ACCAAGGAGCCCTTTTCTTGGATCAAGGTGGATCTGTTGGCAC |
| | RLHPTHYSIRSTLRME | CAATGATTATTCACGGCATCAAGACCCAGGGTGCCCGTCAGAA |
| | LMGCDLNSCSMPLG | GTTCTCCAGCCTCTACATCTCTCAGTTTATCATCATGTATAGTC |
| | MESKAISDAQITASSY | TTGATGGGAAGAAGTGGCAGACTTATCGAGGAAATTCCACTG |
| | FTNMFATWSPSKARL | GAACCTTAATGGTCTTCTTTGGCAATGTGGATTCATCTGGGAT |
| | HLQGRSNAWRPQVN | AAAACACAATATTTTTAACCCTCCAATTATTGCTCGATACATC |
| | NPKEWLQVDFQKTM | CGTTTGCACCCAACTCATTATAGCATTCGCAGCACTCTTCGCAT |
| | KVTGVTTQGVKSLLT | GGAGTTGATGGGCTGTGATTTAAATAGTTGCAGCATGCCATTG |
| | SMYVKEFLISSSQDG | GGAATGGAGAGTAAAGCAATATCAGATGCACAGATTACTGCT |
| | HQWTLFFQNGKVKV | TCATCCTACTTTACCAATATGTTTGCCACCTGGTCTCCTTCAAA |
| | FQGNQDSFTPVVNSL | AGCTCGACTTCACCTCCAAGGGAGGAGTAATGCCTGGAGACCT |
| | DPPLLTRYLRIHPQSW | CAGGTGAATAATCCAAAAGAGTGGCTGCAAGTGGACTTCCAG |
| | VHQIALRMEVLGCEA | AAGACAATGAAAGTCACAGGAGTAACTACTCAGGGAGTAAAA |
| | QDLYGAGSPGAETAE | TCTCTGCTTACCAGCATGTATGTGAAGGAGTTCCTCATCTCCA |
| | QKLISEEDLSPATG | GCAGTCAAGATGGCCATCAGTGGACTCTCTTTTTTCAGAATGG |
| | | CAAAGTAAAGGTTTTTCAGGGAAATCAAGACTCCTTCACACCT |
| | | GTGGTGAACTCTCTAGACCCACCGTTACTGACTCGCTACCTTC |
| | | GAATTCACCCCCAGAGTTGGGTGCACCAGATTGCCCTGAGGAT |
| | | GGAGGTTCTGGGCTGCGAGGCACAGGACCTCTACGGCGCCGG |
| | | ATCACCTGGGGCCGAAACGGCCGAACAAAAACTCATCTCAGA |
| | | AGAGGATCTGTCACCTGCAACCGGTTGA |
| pBC0127 | MQIELSTCFFLCLLRF | ATGCAAATAGAGCTCTCCACCTGCTTCTTTCTGTGCCTTTTGCG |
| | CFSATRGAPGSPAGS | ATTCTGCTTTAGTGCCACCAGAGGCGCGCCAGGTTCTCCTGCT |
| | PTSTEEGTSESATPES | GGCTCCCCCACCTCAACAGAAGAGGGGACAAGCGAAAGCGCT |
| | GPGSEPATSGSETPAS | ACGCCTGAGAGTGGCCCTGGCTCTGAGCCAGCCACCTCCGGCT |
| | SATRRYYLGAVELSW | CTGAAACCCCTGCCTCGAGCGCTACAAGAAGATACTACCTGGG |
| | DYMQSDLGELPVDA | TGCAGTGGAACTGTCATGGGACTATATGCAAAGTGATCTCGGT |
| | RFPPRVPKSFPFNTSV | GAGCTGCCTGTGGACGCAAGATTTCCTCCTAGAGTGCCAAAAT |
| | VYKKTLFVEFTDHLF | CTTTTCCATTCAACACCTCAGTCGTGTACAAAAAGACTCTGTTT |
| | NIAKPRPPWMGLLGP | GTAGAATTCACGGATCACCTTTTCAACATCGCTAAGCCAAGGC |
| | TIQAEVYDTVVITLK | CACCCTGGATGGGTCTGCTAGGTCCTACCATCCAGGCTGAGGT |
| | NMASHPVSLHAVGV | TTATGATACAGTGGTCATTACACTTAAGAACATGGCTTCCCAT |
| | SYWKASEGAEYDDQ | CCTGTCAGTCTTCATGCTGTTGGTGTATCCTACTGGAAAGCTTC |
| | TSQREKEDDKVFPGG | TGAGGGAGCTGAATATGATGATCAGACCAGTCAAAGGGAGAA |
| | SHTYVWQVLKENGP | AGAAGATGATAAAGTCTTCCCTGGTGGAAGCCATACATATGTC |
| | MASDPLCLTYSYLSH | TGGCAGGTCCTGAAAGAGAATGGTCCAATGGCCTCTGACCCAC |
| | VDLVKDLNSGLIGAL | TGTGCCTTACCTACTCATATCTTTCTCATGTGGACCTGGTAAAA |
| | LVCREGSLAKEKTQT | GACTTGAATTCAGGCCTCATTGGAGCCCTACTAGTATGTAGAG |
| | LHKFILLFAVFDEGKS | AAGGGAGTCTGGCCAAGGAAAAGACACAGACCTTGCACAAAT |
| | WHSETKNSLMQDRD | TTATACTACTTTTTGCTGTATTTGATGAAGGGAAAAGTTGGCA |
| | AASARAWPKMHTVN | CTCAGAAACAAAGAACTCCTTGATGCAGGATAGGGATGCTGC |
| | GYVNRSLPGLIGCHR | ATCTGCTCGGGCCTGGCCTAAAATGCACACAGTCAATGGTTAT |
| | KSVYWHVIGMGTTPE | GTAAACAGGTCTCTGCCAGGTCTGATTGGATGCCACAGGAAAT |
| | VHSIFLEGHTFLVRNH | CAGTCTATTGGCATGTGATTGGAATGGGCACCACTCCTGAAGT |
| | RQASLEISPITFLTAQT | GCACTCAATATTCCTCGAAGGTCACACATTTCTTGTGAGGAAC |
| | LLMDLGQFLLFCHISS | CATCGCCAGGCTAGCTTGGAAATCTCGCCAATAACTTTCCTTA |
| | HQHDGMEAYVKVDS | CTGCTCAAACACTCTTGATGGACCTTGGACAGTTTCTACTGTTT |
| | CPEEPQLRMKNNEEA | TGTCATATCTCTTCCCACCAACATGATGGCATGGAAGCTTATG |
| | EDYDDDLTDSEMDV | TCAAAGTAGACAGCTGTCCAGAGGAACCCCAACTACGAATGA |
| | VRFDDDNSPSFIQIRS | AAAATAATGAAGAAGCGGAAGACTATGATGATGATCTTACTG |
| | VAKKHPKTWVHYIA | ATTCTGAAATGGATGTGGTCAGGTTTGATGATGACAACTCTCC |
| | AEEEDWDYAPLVLAP | TTCCTTTATCCAAATTCGCTCAGTTGCCAAGAAGCATCCTAAA |
| | DDRSYKSQYLNNGPQ | ACTTGGGTACATTACATTGCTGCTGAAGAGGAGGACTGGGACT |
| | RIGRKYKKVRFMAYT | ATGCTCCCTTAGTCCTCGCCCCCGATGACAGAAGTTATAAAAG |
| | DETFKTREAIQHESGI | TCAATATTTGAACAATGGCCCTCAGCGGATTGGTAGGAAGTAC |
| | LGPLLYGEVGDTLLII | AAAAAAGTCCGATTTATGGCATACACAGATGAAACCTTTAAG |
| | FKNQASRPYNIYPHGI | ACTCGTGAAGCTATTCAGCATGAATCAGGAATCTTGGGACCTT |
| | TDVRPLYSRRLPKGV | TACTTTATGGGGAAGTTGGAGACACACTGTTGATTATATTTAA |
| | KHLKDFPILPGEIFKY | GAATCAAGCAAGCAGACCATATAACATCTACCCTCACGGAAT |
| | KWTVTVEDGPTKSDP | CACTGATGTCCGTCCTTTGTATTCAAGGAGATTACCAAAAGGT |
| | RCLTRYYSSFVNMER | GTAAAACATTTGAAGGATTTTCCAATTCTGCCAGGAGAAATAT |
| | DLASGLIGPLLICYKE | TCAAATATAAATGGACAGTGACTGTAGAAGATGGGCCAACTA |
| | SVDQRGNQIMSDKRN | AATCAGATCCTCGGTGCCTGACCCGCTATTACTCTAGTTTCGTT |
| | VILFSVFDENRSWYL | AATATGGAGAGAGATCTAGCTTCAGGACTCATTGGCCCTCTCC |
| | TENIQRFLPNPAGVQL | TCATCTGCTACAAAGAATCTGTAGATCAAAGAGGAAACCAGA |
| | EDPEFQASNIMHSING | TAATGTCAGACAAGAGGAATGTCATCCTGTTTTCTGTATTTGA |
| | YVFDSLQLSVCLHEV | TGAGAACCGAAGCTGGTACCTCACAGAGAATATACAACGCTTT |
| | AYWYILSIGAQTDFLS | CTCCCCAATCCAGCTGGAGTGCAGCTTGAGGATCCAGAGTTCC |
| | VFFSGYTFKHKMVYE | AAGCCTCCAACATCATGCACAGCATCAATGGCTATGTTTTTGA |
| | DTLTLFPFSGETVFMS | TAGTTTGCAGTTGTCAGTTTGTTTGCATGAGGTGGCATACTGGT |
| | MENPGLWILGCHNSD | ACATTCTAAGCATTGGAGCACAGACTGACTTCCTTTCTGTCTTC |
| | FRNRGMTALLKVSSC | TTCTCTGGATATACCTTCAAACACAAAATGGTCTATGAAGACA |
| | DKNTGDYYEDSYEDI | CACTCACCCTATTCCCATTCTCAGGAGAAACTGTCTTCATGTCG |
| | SAYLLSKNNAIEPRSF | ATGGAAAACCCAGGTCTATGGATTCTGGGGTGCCACAACTCAG |
| | SQNPPVLKRHQREITR | ACTTTCGGAACAGAGGCATGACCGCCTTACTGAAGGTTTCTAG |
| | TTLQSDQEEIDYDDTI | TTGTGACAAGAACACTGGTGATTATTACGAGGACAGTTATGAA |
| | SVEMKKEDFDIYDED | GATATTTCAGCATACTTGCTGAGTAAAAACAATGCCATTGAAC |
| | ENQSPRSFQKKTRHY | CAAGAAGCTTCTCTCAAAACCCACCAGTCTTGAAACGCCATCA |
| | FIAAVERLWDYGMSS | ACGGGAAATAACTCGTACTACTCTTCAGTCAGATCAAGAGGA |
| | SPHVLRNRAQSGSVP | AATCGATTATGATGATACCATATCAGTTGAAATGAAGAAGGA |
| | QFKKVVFQEFTDGSF | AGATTTTGACATTTATGATGAGGATGAAAATCAGAGCCCCCGC |
| | TQPLYRGELNEHLGL | AGCTTTCAAAAGAAAACACGACACTATTTTATTGCTGCAGTGG |
| | LGPYIRAEVEDNIMV | AGAGGCTCTGGGATTATGGGATGAGTAGCTCCCCACATGTTCT |
| | TFRNQASRPYSFYSSL | AAGAAACAGGGCTCAGAGTGGCAGTGTCCCTCAGTTCAAGAA |
| | ISYEEDQRQGAEPRK | AGTTGTTTTCCAGGAATTTACTGATGGCTCCTTTACTCAGCCCT |
| | NFVKPNETKTYFWK | TATACCGTGGAGAACTAAATGAACATTTGGGACTCCTGGGGCC |
| | VQHHMAPTKDEFDC | ATATATAAGAGCAGAAGTTGAAGATAATATCATGGTAACTTTC |
| | KAWAYFSDVDLEKD | AGAAATCAGGCCTCTCGTCCCTATTCCTTCTATTCTAGCCTTAT |
| | VHSGLIGPLLVCHTN | TTCTTATGAGGAAGATCAGAGGCAAGGAGCAGAACCTAGAAA |
| | TLNPAHGRQVTVQEF | AAACTTTGTCAAGCCTAATGAAACCAAAACTTACTTTTGGAAA |
| | ALFFTIFDETKSWYFT | GTGCAACATCATATGGCACCCACTAAAGATGAGTTTGACTGCA |
| | ENMERNCRAPCNIQM | AAGCCTGGGCTTATTTCTCTGATGTTGACCTGGAAAAAGATGT |
| | EDPTFKENYRFHAIN | GCACTCAGGCCTGATTGGACCCCTTCTGGTCTGCCACACTAAC |
| | GYIMDTLPGLVMAQ | ACACTGAACCCTGCTCATGGGAGACAAGTGACAGTACAGGAA |
| | DQRIRWYLLSMGSNE | TTTGCTCTGTTTTTCACCATCTTTGATGAGACCAAAAGCTGGTA |
| | NIHSIHFSGHVFTVRK | CTTCACTGAAAATATGGAAAGAAACTGCAGGGCTCCCTGCAAT |
| | KEEYKMALYNLYPG | ATCCAGATGGAAGATCCCACTTTTAAAGAGAATTATCGCTTCC |
| | VFETVEMLPSKAGIW | ATGCAATCAATGGCTACATAATGGATACACTACCTGGCTTAGT |
| | RVECLIGEHLHAGMS | AATGGCTCAGGATCAAAGGATTCGATGGTATCTGCTCAGCATG |
| | TLFLVYSNKCQTPLG | GGCAGCAATGAAAACATCCATTCTATTCATTTCAGTGGACATG |
| | MASGHIRDFQITASG | TGTTCACTGTACGAAAAAAAGAGGAGTATAAAATGGCACTGT |
| | QYGQWAPKLARLHY | ACAATCTCTATCCAGGTGTTTTTGAGACAGTGGAAATGTTACC |
| | SGSINAWSTKEPFSWI | ATCCAAAGCTGGAATTTGGCGGGTGGAATGCCTTATTGGCGAG |
| | KVDLLAPMIIHGIKTQ | CATCTACATGCTGGGATGAGCACACTTTTTCTGGTGTACAGCA |
| | GARQKFSSLYISQFII | ATAAGTGTCAGACTCCCCTGGGAATGGCTTCTGGACACATTAG |
| | MYSLDGKKWQTYRG | AGATTTTCAGATTACAGCTTCAGGACAATATGGACAGTGGGCC |
| | NSTGTLMVFFGNVDS | CCAAAGCTGGCCAGACTTCATTATTCCGGATCAATCAATGCCT |
| | SGIKHNIFNPPIIARYI | GGAGCACCAAGGAGCCCTTTTCTTGGATCAAGGTGGATCTGTT |
| | RLHPTHYSIRSTLRME | GGCACCAATGATTATTCACGGCATCAAGACCCAGGGTGCCCGT |
| | LMGCDLNSCSMPLG | CAGAAGTTCTCCAGCCTCTACATCTCTCAGTTTATCATCATGTA |
| | MESKAISDAQITASSY | TAGTCTTGATGGGAAGAAGTGGCAGACTTATCGAGGAAATTCC |
| | FTNMFATWSPSKARL | ACTGGAACCTTAATGGTCTTCTTTGGCAATGTGGATTCATCTG |
| | HLQGRSNAWRPQVN | GGATAAAACACAATATTTTTAACCCTCCAATTATTGCTCGATA |
| | NPKEWLQVDFQKTM | CATCCGTTTGCACCCAACTCATTATAGCATTCGCAGCACTCTTC |
| | KVTGVTTQGVKSLLT | GCATGGAGTTGATGGGCTGTGATTTAAATAGTTGCAGCATGCC |
| | SMYVKEFLISSSQDG | ATTGGGAATGGAGAGTAAAGCAATATCAGATGCACAGATTAC |
| | HQWTLFFQNGKVKV | TGCTTCATCCTACTTTACCAATATGTTTGCCACCTGGTCTCCTT |
| | FQGNQDSFTPVVNSL | CAAAAGCTCGACTTCACCTCCAAGGGAGGAGTAATGCCTGGA |
| | DPPLLTRYLRIHPQSW | GACCTCAGGTGAATAATCCAAAAGAGTGGCTGCAAGTGGACT |
| | VHQIALRMEVLGCEA | TCCAGAAGACAATGAAAGTCACAGGAGTAACTACTCAGGGAG |
| | QDLYGAGSPGAETAE | TAAAATCTCTGCTTACCAGCATGTATGTGAAGGAGTTCCTCAT |
| | QKLISEEDLSPATG | CTCCAGCAGTCAAGATGGCCATCAGTGGACTCTCTTTTTTCAG |
| | | AATGGCAAAGTAAAGGTTTTTCAGGGAAATCAAGACTCCTTCA |
| | | CACCTGTGGTGAACTCTCTAGACCCACCGTTACTGACTCGCTA |
| | | CCTTCGAATTCACCCCCAGAGTTGGGTGCACCAGATTGCCCTG |
| | | AGGATGGAGGTTCTGGGCTGCGAGGCACAGGACCTCTACGGC |
| | | GCCGGATCACCTGGGGCCGAAACGGCCGAACAAAAACTCATC |
| | | TCAGAAGAGGATCTGTCACCTGCAACCGGTTGA |
| pBC0165 | MQIELSTCFFLCLLRF | ATGCAAATAGAGCTCTCCACCTGCTTCTTTCTGTGCCTTTTGCG |
| | CFSATRRYYLGAVEL | ATTCTGCTTTAGTGCCACCAGAAGATACTACCTGGGTGCAGTG |
| | SWDYMQGAPGSPAG | GAACTGTCATGGGACTATATGCAAGGCGCGCCAGGTTCTCCTG |
| | SPTSTEEGTSESATPE | CTGGCTCCCCCACCTCAACAGAAGAGGGGACAAGCGAAAGCG |
| | SGPGSEPATSGSETPA | CTACGCCTGAGAGTGGCCCTGGCTCTGAGCCAGCCACCTCCGG |
| | SSSDLGELPVDARFPP | CTCTGAAACCCCTGCCTCGAGCAGTGATCTCGGTGAGCTGCCT |
| | RVPKSFPFNTSVVYK | GTGGACGCAAGATTTCCTCCTAGAGTGCCAAAATCTTTTCCAT |
| | KTLFVEFTDHLFNIAK | TCAACACCTCAGTCGTGTACAAAAAGACTCTGTTTGTAGAATT |
| | PRPPWMGLLGPTIQA | CACGGATCACCTTTTCAACATCGCTAAGCCAAGGCCACCCTGG |
| | EVYDTVVITLKNMAS | ATGGGTCTGCTAGGTCCTACCATCCAGGCTGAGGTTTATGATA |
| | HPVSLHAVGVSYWK | CAGTGGTCATTACACTTAAGAACATGGCTTCCCATCCTGTCAG |
| | ASEGAEYDDQTSQRE | TCTTCATGCTGTTGGTGTATCCTACTGGAAAGCTTCTGAGGGA |
| | KEDDKVFPGGSHTYV | GCTGAATATGATGATCAGACCAGTCAAAGGGAGAAAGAAGAT |
| | WQVLKENGPMASDP | GATAAAGTCTTCCCTGGTGGAAGCCATACATATGTCTGGCAGG |
| | LCLTYSYLSHVDLVK | TCCTGAAAGAGAATGGTCCAATGGCCTCTGACCCACTGTGCCT |
| | DLNSGLIGALLVCRE | TACCTACTCATATCTTTCTCATGTGGACCTGGTAAAAGACTTG |
| | GSLAKEKTQTLHKFIL | AATTCAGGCCTCATTGGAGCCCTACTAGTATGTAGAGAAGGGA |
| | LFAVFDEGKSWHSET | GTCTGGCCAAGGAAAAGACACAGACCTTGCACAAATTTATACT |
| | KNSLMQDRDAASAR | ACTTTTTGCTGTATTTGATGAAGGGAAAAGTTGGCACTCAGAA |
| | AWPKMHTVNGYVNR | ACAAAGAACTCCTTGATGCAGGATAGGGATGCTGCATCTGCTC |
| | SLPGLIGCHRKSVYW | GGGCCTGGCCTAAAATGCACACAGTCAATGGTTATGTAAACA |
| | HVIGMGTTPEVHSIFL | GGTCTCTGCCAGGTCTGATTGGATGCCACAGGAAATCAGTCTA |
| | EGHTFLVRNHRQASL | TTGGCATGTGATTGGAATGGGCACCACTCCTGAAGTGCACTCA |
| | EISPITFLTAQTLLMD | ATATTCCTCGAAGGTCACACATTTCTTGTGAGGAACCATCGCC |
| | LGQFLLFCHISSHQHD | AGGCTAGCTTGGAAATCTCGCCAATAACTTTCCTTACTGCTCA |
| | GMEAYVKVDSCPEEP | AACACTCTTGATGGACCTTGGACAGTTTCTACTGTTTTGTCATA |
| | QLRMKNNEEAEDYD | TCTCTTCCCACCAACATGATGGCATGGAAGCTTATGTCAAAGT |
| | DDLTDSEMDVVRFD | AGACAGCTGTCCAGAGGAACCCCAACTACGAATGAAAAATAA |
| | DDNSPSFIQIRSVAKK | TGAAGAAGCGGAAGACTATGATGATGATCTTACTGATTCTGAA |
| | HPKTWVHYIAAEEED | ATGGATGTGGTCAGGTTTGATGATGACAACTCTCCTTCCTTTAT |
| | WDYAPLVLAPDDRS | CCAAATTCGCTCAGTTGCCAAGAAGCATCCTAAAACTTGGGTA |
| | YKSQYLNNGPQRIGR | CATTACATTGCTGCTGAAGAGGAGGACTGGGACTATGCTCCCT |
| | KYKKVRFMAYTDET | TAGTCCTCGCCCCCGATGACAGAAGTTATAAAAGTCAATATTT |
| | FKTREAIQHESGILGP | GAACAATGGCCCTCAGCGGATTGGTAGGAAGTACAAAAAAGT |
| | LLYGEVGDTLLIIFKN | CCGATTTATGGCATACACAGATGAAACCTTTAAGACTCGTGAA |
| | QASRPYNIYPHGITDV | GCTATTCAGCATGAATCAGGAATCTTGGGACCTTTACTTTATG |
| | RPLYSRRLPKGVKHL | GGGAAGTTGGAGACACACTGTTGATTATATTTAAGAATCAAGC |
| | KDFPILPGEIFKYKWT | AAGCAGACCATATAACATCTACCCTCACGGAATCACTGATGTC |
| | VTVEDGPTKSDPRCL | CGTCCTTTGTATTCAAGGAGATTACCAAAAGGTGTAAAACATT |
| | TRYYSSFVNMERDLA | TGAAGGATTTTCCAATTCTGCCAGGAGAAATATTCAAATATAA |
| | SGLIGPLLICYKESVD | ATGGACAGTGACTGTAGAAGATGGGCCAACTAAATCAGATCC |
| | QRGNQIMSDKRNVIL | TCGGTGCCTGACCCGCTATTACTCTAGTTTCGTTAATATGGAG |
| | FSVFDENRSWYLTEN | AGAGATCTAGCTTCAGGACTCATTGGCCCTCTCCTCATCTGCT |
| | IQRFLPNPAGVQLEDP | ACAAAGAATCTGTAGATCAAAGAGGAAACCAGATAATGTCAG |
| | EFQASNIMHSINGYVF | ACAAGAGGAATGTCATCCTGTTTTCTGTATTTGATGAGAACCG |
| | DSLQLSVCLHEVAY | AAGCTGGTACCTCACAGAGAATATACAACGCTTTCTCCCCAAT |
| | WYILSIGAQTDFLSVF | CCAGCTGGAGTGCAGCTTGAGGATCCAGAGTTCCAAGCCTCCA |
| | FSGYTFKHKMVYEDT | ACATCATGCACAGCATCAATGGCTATGTTTTTGATAGTTTGCA |
| | LTLFPFSGETVFMSM | GTTGTCAGTTTGTTTGCATGAGGTGGCATACTGGTACATTCTA |
| | ENPGLWILGCHNSDF | AGCATTGGAGCACAGACTGACTTCCTTTCTGTCTTCTTCTCTGG |
| | RNRGMTALLKVSSCD | ATATACCTTCAAACACAAAATGGTCTATGAAGACACACTCACC |
| | KNTGDYYEDSYEDIS | CTATTCCCATTCTCAGGAGAAACTGTCTTCATGTCGATGGAAA |
| | AYLLSKNNAIEPRSFS | ACCCAGGTCTATGGATTCTGGGGTGCCACAACTCAGACTTTCG |
| | QNPPVLKRHQREITR | GAACAGAGGCATGACCGCCTTACTGAAGGTTTCTAGTTGTGAC |
| | TTLQSDQEEIDYDDTI | AAGAACACTGGTGATTATTACGAGGACAGTTATGAAGATATTT |
| | SVEMKKEDFDIYDED | CAGCATACTTGCTGAGTAAAAACAATGCCATTGAACCAAGAA |
| | ENQSPRSFQKKTRHY | GCTTCTCTCAAAACCCACCAGTCTTGAAACGCCATCAACGGGA |
| | FIAAVERLWDYGMSS | AATAACTCGTACTACTCTTCAGTCAGATCAAGAGGAAATCGAT |
| | SPHVLRNRAQSGSVP | TATGATGATACCATATCAGTTGAAATGAAGAAGGAAGATTTTG |
| | QFKKVVFQEFTDGSF | ACATTTATGATGAGGATGAAAATCAGAGCCCCCGCAGCTTTCA |
| | TQPLYRGELNEHLGL | AAAGAAAACACGACACTATTTTATTGCTGCAGTGGAGAGGCTC |
| | LGPYIRAEVEDNIMV | TGGGATTATGGGATGAGTAGCTCCCCACATGTTCTAAGAAACA |
| | TFRNQASRPYSFYSSL | GGGCTCAGAGTGGCAGTGTCCCTCAGTTCAAGAAAGTTGTTTT |
| | ISYEEDQRQGAEPRK | CCAGGAATTTACTGATGGCTCCTTTACTCAGCCCTTATACCGTG |
| | NFVKPNETKTYFWK | GAGAACTAAATGAACATTTGGGACTCCTGGGGCCATATATAA |
| | VQHHMAPTKDEFDC | GAGCAGAAGTTGAAGATAATATCATGGTAACTTTCAGAAATC |
| | KAWAYFSDVDLEKD | AGGCCTCTCGTCCCTATTCCTTCTATTCTAGCCTTATTTCTTATG |
| | VHSGLIGPLLVCHTN | AGGAAGATCAGAGGCAAGGAGCAGAACCTAGAAAAAACTTTG |
| | TLNPAHGRQVTVQEF | TCAAGCCTAATGAAACCAAAACTTACTTTTGGAAAGTGCAACA |
| | ALFFTIFDETKSWYFT | TCATATGGCACCCACTAAAGATGAGTTTGACTGCAAAGCCTGG |
| | ENMERNCRAPCNIQM | GCTTATTTCTCTGATGTTGACCTGGAAAAAGATGTGCACTCAG |
| | EDPTFKENYRFHAIN | GCCTGATTGGACCCCTTCTGGTCTGCCACACTAACACACTGAA |
| | GYIMDTLPGLVMAQ | CCCTGCTCATGGGAGACAAGTGACAGTACAGGAATTTGCTCTG |
| | DQRIRWYLLSMGSNE | TTTTTCACCATCTTTGATGAGACCAAAAGCTGGTACTTCACTG |
| | NIHSIHFSGHVFTVRK | AAAATATGGAAAGAAACTGCAGGGCTCCCTGCAATATCCAGA |
| | KEEYKMALYNLYPG | TGGAAGATCCCACTTTTAAAGAGAATTATCGCTTCCATGCAAT |
| | VFETVEMLPSKAGIW | CAATGGCTACATAATGGATACACTACCTGGCTTAGTAATGGCT |
| | RVECLIGEHLHAGMS | CAGGATCAAAGGATTCGATGGTATCTGCTCAGCATGGGCAGC |
| | TLFLVYSNKCQTPLG | AATGAAAACATCCATTCTATTCATTTCAGTGGACATGTGTTCA |
| | MASGHIRDFQITASG | CTGTACGAAAAAAAGAGGAGTATAAAATGGCACTGTACAATC |
| | QYGQWAPKLARLHY | TCTATCCAGGTGTTTTTGAGACAGTGGAAATGTTACCATCCAA |
| | SGSINAWSTKEPFSWI | AGCTGGAATTTGGCGGGTGGAATGCCTTATTGGCGAGCATCTA |
| | KVDLLAPMIIHGIKTQ | CATGCTGGGATGAGCACACTTTTTCTGGTGTACAGCAATAAGT |
| | GARQKFSSLYISQFII | GTCAGACTCCCCTGGGAATGGCTTCTGGACACATTAGAGATTT |
| | MYSLDGKKWQTYRG | TCAGATTACAGCTTCAGGACAATATGGACAGTGGGCCCCAAA |
| | NSTGTLMVFFGNVDS | GCTGGCCAGACTTCATTATTCCGGATCAATCAATGCCTGGAGC |
| | SGIKHNIFNPPIIARYI | ACCAAGGAGCCCTTTTCTTGGATCAAGGTGGATCTGTTGGCAC |
| | RLHPTHYSIRSTLRME | CAATGATTATTCACGGCATCAAGACCCAGGGTGCCCGTCAGAA |
| | LMGCDLNSCSMPLG | GTTCTCCAGCCTCTACATCTCTCAGTTTATCATCATGTATAGTC |
| | MESKAISDAQITASSY | TTGATGGGAAGAAGTGGCAGACTTATCGAGGAAATTCCACTG |
| | FTNMFATWSPSKARL | GAACCTTAATGGTCTTCTTTGGCAATGTGGATTCATCTGGGAT |
| | HLQGRSNAWRPQVN | AAAACACAATATTTTTAACCCTCCAATTATTGCTCGATACATC |
| | NPKEWLQVDFQKTM | CGTTTGCACCCAACTCATTATAGCATTCGCAGCACTCTTCGCAT |
| | KVTGVTTQGVKSLLT | GGAGTTGATGGGCTGTGATTTAAATAGTTGCAGCATGCCATTG |
| | SMYVKEFLISSSQDG | GGAATGGAGAGTAAAGCAATATCAGATGCACAGATTACTGCT |
| | HQWTLFFQNGKVKV | TCATCCTACTTTACCAATATGTTTGCCACCTGGTCTCCTTCAAA |
| | FQGNQDSFTPVVNSL | AGCTCGACTTCACCTCCAAGGGAGGAGTAATGCCTGGAGACCT |
| | DPPLLTRYLRIHPQSW | CAGGTGAATAATCCAAAAGAGTGGCTGCAAGTGGACTTCCAG |
| | VHQIALRMEVLGCEA | AAGACAATGAAAGTCACAGGAGTAACTACTCAGGGAGTAAAA |
| | QDLYGAGSPGAETAE | TCTCTGCTTACCAGCATGTATGTGAAGGAGTTCCTCATCTCCA |
| | QKLISEEDLSPATG | GCAGTCAAGATGGCCATCAGTGGACTCTCTTTTTTCAGAATGG |
| | | CAAAGTAAAGGTTTTTCAGGGAAATCAAGACTCCTTCACACCT |
| | | GTGGTGAACTCTCTAGACCCACCGTTACTGACTCGCTACCTTC |
| | | GAATTCACCCCCAGAGTTGGGTGCACCAGATTGCCCTGAGGAT |
| | | GGAGGTTCTGGGCTGCGAGGCACAGGACCTCTACGGCGCCGG |
| | | ATCACCTGGGGCCGAAACGGCCGAACAAAAACTCATCTCAGA |
| | | AGAGGATCTGTCACCTGCAACCGGTTGA |
| pBC0183 | MQIELSTCFFLCLLRF | ATGCAAATAGAGCTCTCCACCTGCTTCTTTCTGTGCCTTTTGCG |
| | CFSATRRYYLGAVEL | ATTCTGCTTTAGTGCCACCAGAAGATACTACCTGGGTGCAGTG |
| | SWDYMQSDLGGAPG | GAACTGTCATGGGACTATATGCAAAGTGATCTCGGTGGCGCGC |
| | SPAGSPTSTEEGTSES | CAGGTTCTCCTGCTGGCTCCCCCACCTCAACAGAAGAGGGGAC |
| | ATPESGPGSEPATSGS | AAGCGAAAGCGCTACGCCTGAGAGTGGCCCTGGCTCTGAGCC |
| | ETPASSELPVDARFPP | AGCCACCTCCGGCTCTGAAACCCCTGCCTCGAGCGAGCTGCCT |
| | RVPKSFPFNTSVVYK | GTGGACGCAAGATTTCCTCCTAGAGTGCCAAAATCTTTTCCAT |
| | KTLFVEFTDHLFNIAK | TCAACACCTCAGTCGTGTACAAAAAGACTCTGTTTGTAGAATT |
| | PRPPWMGLLGPTIQA | CACGGATCACCTTTTCAACATCGCTAAGCCAAGGCCACCCTGG |
| | EVYDTVVITLKNMAS | ATGGGTCTGCTAGGTCCTACCATCCAGGCTGAGGTTTATGATA |
| | HPVSLHAVGVSYWK | CAGTGGTCATTACACTTAAGAACATGGCTTCCCATCCTGTCAG |
| | ASEGAEYDDQTSQRE | TCTTCATGCTGTTGGTGTATCCTACTGGAAAGCTTCTGAGGGA |
| | KEDDKVFPGGSHTYV | GCTGAATATGATGATCAGACCAGTCAAAGGGAGAAAGAAGAT |
| | WQVLKENGPMASDP | GATAAAGTCTTCCCTGGTGGAAGCCATACATATGTCTGGCAGG |
| | LCLTYSYLSHVDLVK | TCCTGAAAGAGAATGGTCCAATGGCCTCTGACCCACTGTGCCT |
| | DLNSGLIGALLVCRE | TACCTACTCATATCTTTCTCATGTGGACCTGGTAAAAGACTTG |
| | GSLAKEKTQTLHKFIL | AATTCAGGCCTCATTGGAGCCCTACTAGTATGTAGAGAAGGGA |
| | LFAVFDEGKSWHSET | GTCTGGCCAAGGAAAAGACACAGACCTTGCACAAATTTATACT |
| | KNSLMQDRDAASAR | ACTTTTTGCTGTATTTGATGAAGGGAAAAGTTGGCACTCAGAA |
| | AWPKMHTVNGYVNR | ACAAAGAACTCCTTGATGCAGGATAGGGATGCTGCATCTGCTC |
| | SLPGLIGCHRKSVYW | GGGCCTGGCCTAAAATGCACACAGTCAATGGTTATGTAAACA |
| | HVIGMGTTPEVHSIFL | GGTCTCTGCCAGGTCTGATTGGATGCCACAGGAAATCAGTCTA |
| | EGHTFLVRNHRQASL | TTGGCATGTGATTGGAATGGGCACCACTCCTGAAGTGCACTCA |
| | EISPITFLTAQTLLMD | ATATTCCTCGAAGGTCACACATTTCTTGTGAGGAACCATCGCC |
| | LGQFLLFCHISSHQHD | AGGCTAGCTTGGAAATCTCGCCAATAACTTTCCTTACTGCTCA |
| | GMEAYVKVDSCPEEP | AACACTCTTGATGGACCTTGGACAGTTTCTACTGTTTTGTCATA |
| | QLRMKNNEEAEDYD | TCTCTTCCCACCAACATGATGGCATGGAAGCTTATGTCAAAGT |
| | DDLTDSEMDVVRFD | AGACAGCTGTCCAGAGGAACCCCAACTACGAATGAAAAATAA |
| | DDNSPSFIQIRSVAKK | TGAAGAAGCGGAAGACTATGATGATGATCTTACTGATTCTGAA |
| | HPKTWVHYIAAEEED | ATGGATGTGGTCAGGTTTGATGATGACAACTCTCCTTCCTTTAT |
| | WDYAPLVLAPDDRS | CCAAATTCGCTCAGTTGCCAAGAAGCATCCTAAAACTTGGGTA |
| | YKSQYLNNGPQRIGR | CATTACATTGCTGCTGAAGAGGAGGACTGGGACTATGCTCCCT |
| | KYKKVRFMAYTDET | TAGTCCTCGCCCCCGATGACAGAAGTTATAAAAGTCAATATTT |
| | FKTREAIQHESGILGP | GAACAATGGCCCTCAGCGGATTGGTAGGAAGTACAAAAAAGT |
| | LLYGEVGDTLLIIFKN | CCGATTTATGGCATACACAGATGAAACCTTTAAGACTCGTGAA |
| | QASRPYNIYPHGITDV | GCTATTCAGCATGAATCAGGAATCTTGGGACCTTTACTTTATG |
| | RPLYSRRLPKGVKHL | GGGAAGTTGGAGACACACTGTTGATTATATTTAAGAATCAAGC |
| | KDFPILPGEIFKYKWT | AAGCAGACCATATAACATCTACCCTCACGGAATCACTGATGTC |
| | VTVEDGPTKSDPRCL | CGTCCTTTGTATTCAAGGAGATTACCAAAAGGTGTAAAACATT |
| | TRYYSSFVNMERDLA | TGAAGGATTTTCCAATTCTGCCAGGAGAAATATTCAAATATAA |
| | SGLIGPLLICYKESVD | ATGGACAGTGACTGTAGAAGATGGGCCAACTAAATCAGATCC |
| | QRGNQIMSDKRNVIL | TCGGTGCCTGACCCGCTATTACTCTAGTTTCGTTAATATGGAG |
| | FSVFDENRSWYLTEN | AGAGATCTAGCTTCAGGACTCATTGGCCCTCTCCTCATCTGCT |
| | IQRFLPNPAGVQLEDP | ACAAAGAATCTGTAGATCAAAGAGGAAACCAGATAATGTCAG |
| | EFQASNIMHSINGYVF | ACAAGAGGAATGTCATCCTGTTTTCTGTATTTGATGAGAACCG |
| | DSLQLSVCLHEVAY | AAGCTGGTACCTCACAGAGAATATACAACGCTTTCTCCCCAAT |
| | WYILSIGAQTDFLSVF | CCAGCTGGAGTGCAGCTTGAGGATCCAGAGTTCCAAGCCTCCA |
| | FSGYTFKHKMVYEDT | ACATCATGCACAGCATCAATGGCTATGTTTTTGATAGTTTGCA |
| | LTLFPFSGETVFMSM | GTTGTCAGTTTGTTTGCATGAGGTGGCATACTGGTACATTCTA |
| | ENPGLWILGCHNSDF | AGCATTGGAGCACAGACTGACTTCCTTTCTGTCTTCTTCTCTGG |
| | RNRGMTALLKVSSCD | ATATACCTTCAAACACAAAATGGTCTATGAAGACACACTCACC |
| | KNTGDYYEDSYEDIS | CTATTCCCATTCTCAGGAGAAACTGTCTTCATGTCGATGGAAA |
| | AYLLSKNNAIEPRSFS | ACCCAGGTCTATGGATTCTGGGGTGCCACAACTCAGACTTTCG |
| | QNPPVLKRHQREITR | GAACAGAGGCATGACCGCCTTACTGAAGGTTTCTAGTTGTGAC |
| | TTLQSDQEEIDYDDTI | AAGAACACTGGTGATTATTACGAGGACAGTTATGAAGATATTT |
| | SVEMKKEDFDIYDED | CAGCATACTTGCTGAGTAAAAACAATGCCATTGAACCAAGAA |
| | ENQSPRSFQKKTRHY | GCTTCTCTCAAAACCCACCAGTCTTGAAACGCCATCAACGGGA |
| | FIAAVERLWDYGMSS | AATAACTCGTACTACTCTTCAGTCAGATCAAGAGGAAATCGAT |
| | SPHVLRNRAQSGSVP | TATGATGATACCATATCAGTTGAAATGAAGAAGGAAGATTTTG |
| | QFKKVVFQEFTDGSF | ACATTTATGATGAGGATGAAAATCAGAGCCCCCGCAGCTTTCA |
| | TQPLYRGELNEHLGL | AAAGAAAACACGACACTATTTTATTGCTGCAGTGGAGAGGCTC |
| | LGPYIRAEVEDNIMV | TGGGATTATGGGATGAGTAGCTCCCCACATGTTCTAAGAAACA |
| | TFRNQASRPYSFYSSL | GGGCTCAGAGTGGCAGTGTCCCTCAGTTCAAGAAAGTTGTTTT |
| | ISYEEDQRQGAEPRK | CCAGGAATTTACTGATGGCTCCTTTACTCAGCCCTTATACCGTG |
| | NFVKPNETKTYFWK | GAGAACTAAATGAACATTTGGGACTCCTGGGGCCATATATAA |
| | VQHHMAPTKDEFDC | GAGCAGAAGTTGAAGATAATATCATGGTAACTTTCAGAAATC |
| | KAWAYFSDVDLEKD | AGGCCTCTCGTCCCTATTCCTTCTATTCTAGCCTTATTTCTTATG |
| | VHSGLIGPLLVCHTN | AGGAAGATCAGAGGCAAGGAGCAGAACCTAGAAAAAACTTTG |
| | TLNPAHGRQVTVQEF | TCAAGCCTAATGAAACCAAAACTTACTTTTGGAAAGTGCAACA |
| | ALFFTIFDETKSWYFT | TCATATGGCACCCACTAAAGATGAGTTTGACTGCAAAGCCTGG |
| | ENMERNCRAPCNIQM | GCTTATTTCTCTGATGTTGACCTGGAAAAAGATGTGCACTCAG |
| | EDPTFKENYRFHAIN | GCCTGATTGGACCCCTTCTGGTCTGCCACACTAACACACTGAA |
| | GYIMDTLPGLVMAQ | CCCTGCTCATGGGAGACAAGTGACAGTACAGGAATTTGCTCTG |
| | DQRIRWYLLSMGSNE | TTTTTCACCATCTTTGATGAGACCAAAAGCTGGTACTTCACTG |
| | NIHSIHFSGHVFTVRK | AAAATATGGAAAGAAACTGCAGGGCTCCCTGCAATATCCAGA |
| | KEEYKMALYNLYPG | TGGAAGATCCCACTTTTAAAGAGAATTATCGCTTCCATGCAAT |
| | VFETVEMLPSKAGIW | CAATGGCTACATAATGGATACACTACCTGGCTTAGTAATGGCT |
| | RVECLIGEHLHAGMS | CAGGATCAAAGGATTCGATGGTATCTGCTCAGCATGGGCAGC |
| | TLFLVYSNKCQTPLG | AATGAAAACATCCATTCTATTCATTTCAGTGGACATGTGTTCA |
| | MASGHIRDFQITASG | CTGTACGAAAAAAAGAGGAGTATAAAATGGCACTGTACAATC |
| | QYGQWAPKLARLHY | TCTATCCAGGTGTTTTTGAGACAGTGGAAATGTTACCATCCAA |
| | SGSINAWSTKEPFSWI | AGCTGGAATTTGGCGGGTGGAATGCCTTATTGGCGAGCATCTA |
| | KVDLLAPMIIHGIKTQ | CATGCTGGGATGAGCACACTTTTTCTGGTGTACAGCAATAAGT |
| | GARQKFSSLYISQFII | GTCAGACTCCCCTGGGAATGGCTTCTGGACACATTAGAGATTT |
| | MYSLDGKKWQTYRG | TCAGATTACAGCTTCAGGACAATATGGACAGTGGGCCCCAAA |
| | NSTGTLMVFFGNVDS | GCTGGCCAGACTTCATTATTCCGGATCAATCAATGCCTGGAGC |
| | SGIKHNIFNPPIIARYI | ACCAAGGAGCCCTTTTCTTGGATCAAGGTGGATCTGTTGGCAC |
| | RLHPTHYSIRSTLRME | CAATGATTATTCACGGCATCAAGACCCAGGGTGCCCGTCAGAA |
| | LMGCDLNSCSMPLG | GTTCTCCAGCCTCTACATCTCTCAGTTTATCATCATGTATAGTC |
| | MESKAISDAQITASSY | TTGATGGGAAGAAGTGGCAGACTTATCGAGGAAATTCCACTG |
| | FTNMFATWSPSKARL | GAACCTTAATGGTCTTCTTTGGCAATGTGGATTCATCTGGGAT |
| | HLQGRSNAWRPQVN | AAAACACAATATTTTTAACCCTCCAATTATTGCTCGATACATC |
| | NPKEWLQVDFQKTM | CGTTTGCACCCAACTCATTATAGCATTCGCAGCACTCTTCGCAT |
| | KVTGVTTQGVKSLLT | GGAGTTGATGGGCTGTGATTTAAATAGTTGCAGCATGCCATTG |
| | SMYVKEFLISSSQDG | GGAATGGAGAGTAAAGCAATATCAGATGCACAGATTACTGCT |
| | HQWTLFFQNGKVKV | TCATCCTACTTTACCAATATGTTTGCCACCTGGTCTCCTTCAAA |
| | FQGNQDSFTPVVNSL | AGCTCGACTTCACCTCCAAGGGAGGAGTAATGCCTGGAGACCT |
| | DPPLLTRYLRIHPQSW | CAGGTGAATAATCCAAAAGAGTGGCTGCAAGTGGACTTCCAG |
| | VHQIALRMEVLGCEA | AAGACAATGAAAGTCACAGGAGTAACTACTCAGGGAGTAAAA |
| | QDLYGAGSPGAETAE | TCTCTGCTTACCAGCATGTATGTGAAGGAGTTCCTCATCTCCA |
| | QKLISEEDLSPATG | GCAGTCAAGATGGCCATCAGTGGACTCTCTTTTTTCAGAATGG |
| | | CAAAGTAAAGGTTTTTCAGGGAAATCAAGACTCCTTCACACCT |
| | | GTGGTGAACTCTCTAGACCCACCGTTACTGACTCGCTACCTTC |
| | | GAATTCACCCCCAGAGTTGGGTGCACCAGATTGCCCTGAGGAT |
| | | GGAGGTTCTGGGCTGCGAGGCACAGGACCTCTACGGCGCCGG |
| | | ATCACCTGGGGCCGAAACGGCCGAACAAAAACTCATCTCAGA |
| | | AGAGGATCTGTCACCTGCAACCGGTTGA |
| pBC0184 | MQIELSTCFFLCLLRF | ATGCAAATAGAGCTCTCCACCTGCTTCTTTCTGTGCCTTTTGCG |
| | CFSATRRYYLGAVEL | ATTCTGCTTTAGTGCCACCAGAAGATACTACCTGGGTGCAGTG |
| | SWDYMQSDLGELPV | GAACTGTCATGGGACTATATGCAAAGTGATCTCGGTGAGCTGC |
| | GAPGSPAGSPTSTEEG | CTGTGGGCGCGCCAGGTTCTCCTGCTGGCTCCCCCACCTCAAC |
| | TSESATPESGPGSEPA | AGAAGAGGGGACAAGCGAAAGCGCTACGCCTGAGAGTGGCCC |
| | TSGSETPASSDARFPP | TGGCTCTGAGCCAGCCACCTCCGGCTCTGAAACCCCTGCCTCG |
| | RVPKSFPFNTSVVYK | AGCGACGCAAGATTTCCTCCTAGAGTGCCAAAATCTTTTCCAT |
| | KTLFVEFTDHLFNIAK | TCAACACCTCAGTCGTGTACAAAAAGACTCTGTTTGTAGAATT |
| | PRPPWMGLLGPTIQA | CACGGATCACCTTTTCAACATCGCTAAGCCAAGGCCACCCTGG |
| | EVYDTVVITLKNMAS | ATGGGTCTGCTAGGTCCTACCATCCAGGCTGAGGTTTATGATA |
| | HPVSLHAVGVSYWK | CAGTGGTCATTACACTTAAGAACATGGCTTCCCATCCTGTCAG |
| | ASEGAEYDDQTSQRE | TCTTCATGCTGTTGGTGTATCCTACTGGAAAGCTTCTGAGGGA |
| | KEDDKVFPGGSHTYV | GCTGAATATGATGATCAGACCAGTCAAAGGGAGAAAGAAGAT |
| | WQVLKENGPMASDP | GATAAAGTCTTCCCTGGTGGAAGCCATACATATGTCTGGCAGG |
| | LCLTYSYLSHVDLVK | TCCTGAAAGAGAATGGTCCAATGGCCTCTGACCCACTGTGCCT |
| | DLNSGLIGALLVCRE | TACCTACTCATATCTTTCTCATGTGGACCTGGTAAAAGACTTG |
| | GSLAKEKTQTLHKFIL | AATTCAGGCCTCATTGGAGCCCTACTAGTATGTAGAGAAGGGA |
| | LFAVFDEGKSWHSET | GTCTGGCCAAGGAAAAGACACAGACCTTGCACAAATTTATACT |
| | KNSLMQDRDAASAR | ACTTTTTGCTGTATTTGATGAAGGGAAAAGTTGGCACTCAGAA |
| | AWPKMHTVNGYVNR | ACAAAGAACTCCTTGATGCAGGATAGGGATGCTGCATCTGCTC |
| | SLPGLIGCHRKSVYW | GGGCCTGGCCTAAAATGCACACAGTCAATGGTTATGTAAACA |
| | HVIGMGTTPEVHSIFL | GGTCTCTGCCAGGTCTGATTGGATGCCACAGGAAATCAGTCTA |
| | EGHTFLVRNHRQASL | TTGGCATGTGATTGGAATGGGCACCACTCCTGAAGTGCACTCA |
| | EISPITFLTAQTLLMD | ATATTCCTCGAAGGTCACACATTTCTTGTGAGGAACCATCGCC |
| | LGQFLLFCHISSHQHD | AGGCTAGCTTGGAAATCTCGCCAATAACTTTCCTTACTGCTCA |
| | GMEAYVKVDSCPEEP | AACACTCTTGATGGACCTTGGACAGTTTCTACTGTTTTGTCATA |
| | QLRMKNNEEAEDYD | TCTCTTCCCACCAACATGATGGCATGGAAGCTTATGTCAAAGT |
| | DDLTDSEMDVVRFD | AGACAGCTGTCCAGAGGAACCCCAACTACGAATGAAAAATAA |
| | DDNSPSFIQIRSVAKK | TGAAGAAGCGGAAGACTATGATGATGATCTTACTGATTCTGAA |
| | HPKTWVHYIAAEEED | ATGGATGTGGTCAGGTTTGATGATGACAACTCTCCTTCCTTTAT |
| | WDYAPLVLAPDDRS | CCAAATTCGCTCAGTTGCCAAGAAGCATCCTAAAACTTGGGTA |
| | YKSQYLNNGPQRIGR | CATTACATTGCTGCTGAAGAGGAGGACTGGGACTATGCTCCCT |
| | KYKKVRFMAYTDET | TAGTCCTCGCCCCCGATGACAGAAGTTATAAAAGTCAATATTT |
| | FKTREAIQHESGILGP | GAACAATGGCCCTCAGCGGATTGGTAGGAAGTACAAAAAAGT |
| | LLYGEVGDTLLIIFKN | CCGATTTATGGCATACACAGATGAAACCTTTAAGACTCGTGAA |
| | QASRPYNIYPHGITDV | GCTATTCAGCATGAATCAGGAATCTTGGGACCTTTACTTTATG |
| | RPLYSRRLPKGVKHL | GGGAAGTTGGAGACACACTGTTGATTATATTTAAGAATCAAGC |
| | KDFPILPGEIFKYKWT | AAGCAGACCATATAACATCTACCCTCACGGAATCACTGATGTC |
| | VTVEDGPTKSDPRCL | CGTCCTTTGTATTCAAGGAGATTACCAAAAGGTGTAAAACATT |
| | TRYYSSFVNMERDLA | TGAAGGATTTTCCAATTCTGCCAGGAGAAATATTCAAATATAA |
| | SGLIGPLLICYKESVD | ATGGACAGTGACTGTAGAAGATGGGCCAACTAAATCAGATCC |
| | QRGNQIMSDKRNVIL | TCGGTGCCTGACCCGCTATTACTCTAGTTTCGTTAATATGGAG |
| | FSVFDENRSWYLTEN | AGAGATCTAGCTTCAGGACTCATTGGCCCTCTCCTCATCTGCT |
| | IQRFLPNPAGVQLEDP | ACAAAGAATCTGTAGATCAAAGAGGAAACCAGATAATGTCAG |
| | EFQASNIMHSINGYVF | ACAAGAGGAATGTCATCCTGTTTTCTGTATTTGATGAGAACCG |
| | DSLQLSVCLHEVAY | AAGCTGGTACCTCACAGAGAATATACAACGCTTTCTCCCCAAT |
| | WYILSIGAQTDFLSVF | CCAGCTGGAGTGCAGCTTGAGGATCCAGAGTTCCAAGCCTCCA |
| | FSGYTFKHKMVYEDT | ACATCATGCACAGCATCAATGGCTATGTTTTTGATAGTTTGCA |
| | LTLFPFSGETVFMSM | GTTGTCAGTTTGTTTGCATGAGGTGGCATACTGGTACATTCTA |
| | ENPGLWILGCHNSDF | AGCATTGGAGCACAGACTGACTTCCTTTCTGTCTTCTTCTCTGG |
| | RNRGMTALLKVSSCD | ATATACCTTCAAACACAAAATGGTCTATGAAGACACACTCACC |
| | KNTGDYYEDSYEDIS | CTATTCCCATTCTCAGGAGAAACTGTCTTCATGTCGATGGAAA |
| | AYLLSKNNAIEPRSFS | ACCCAGGTCTATGGATTCTGGGGTGCCACAACTCAGACTTTCG |
| | QNPPVLKRHQREITR | GAACAGAGGCATGACCGCCTTACTGAAGGTTTCTAGTTGTGAC |
| | TTLQSDQEEIDYDDTI | AAGAACACTGGTGATTATTACGAGGACAGTTATGAAGATATTT |
| | SVEMKKEDFDIYDED | CAGCATACTTGCTGAGTAAAAACAATGCCATTGAACCAAGAA |
| | ENQSPRSFQKKTRHY | GCTTCTCTCAAAACCCACCAGTCTTGAAACGCCATCAACGGGA |
| | FIAAVERLWDYGMSS | AATAACTCGTACTACTCTTCAGTCAGATCAAGAGGAAATCGAT |
| | SPHVLRNRAQSGSVP | TATGATGATACCATATCAGTTGAAATGAAGAAGGAAGATTTTG |
| | QFKKVVFQEFTDGSF | ACATTTATGATGAGGATGAAAATCAGAGCCCCCGCAGCTTTCA |
| | TQPLYRGELNEHLGL | AAAGAAAACACGACACTATTTTATTGCTGCAGTGGAGAGGCTC |
| | LGPYIRAEVEDNIMV | TGGGATTATGGGATGAGTAGCTCCCCACATGTTCTAAGAAACA |
| | TFRNQASRPYSFYSSL | GGGCTCAGAGTGGCAGTGTCCCTCAGTTCAAGAAAGTTGTTTT |
| | ISYEEDQRQGAEPRK | CCAGGAATTTACTGATGGCTCCTTTACTCAGCCCTTATACCGTG |
| | NFVKPNETKTYFWK | GAGAACTAAATGAACATTTGGGACTCCTGGGGCCATATATAA |
| | VQHHMAPTKDEFDC | GAGCAGAAGTTGAAGATAATATCATGGTAACTTTCAGAAATC |
| | KAWAYFSDVDLEKD | AGGCCTCTCGTCCCTATTCCTTCTATTCTAGCCTTATTTCTTATG |
| | VHSGLIGPLLVCHTN | AGGAAGATCAGAGGCAAGGAGCAGAACCTAGAAAAAACTTTG |
| | TLNPAHGRQVTVQEF | TCAAGCCTAATGAAACCAAAACTTACTTTTGGAAAGTGCAACA |
| | ALFFTIFDETKSWYFT | TCATATGGCACCCACTAAAGATGAGTTTGACTGCAAAGCCTGG |
| | ENMERNCRAPCNIQM | GCTTATTTCTCTGATGTTGACCTGGAAAAAGATGTGCACTCAG |
| | EDPTFKENYRFHAIN | GCCTGATTGGACCCCTTCTGGTCTGCCACACTAACACACTGAA |
| | GYIMDTLPGLVMAQ | CCCTGCTCATGGGAGACAAGTGACAGTACAGGAATTTGCTCTG |
| | DQRIRWYLLSMGSNE | TTTTTCACCATCTTTGATGAGACCAAAAGCTGGTACTTCACTG |
| | NIHSIHFSGHVFTVRK | AAAATATGGAAAGAAACTGCAGGGCTCCCTGCAATATCCAGA |
| | KEEYKMALYNLYPG | TGGAAGATCCCACTTTTAAAGAGAATTATCGCTTCCATGCAAT |
| | VFETVEMLPSKAGIW | CAATGGCTACATAATGGATACACTACCTGGCTTAGTAATGGCT |
| | RVECLIGEHLHAGMS | CAGGATCAAAGGATTCGATGGTATCTGCTCAGCATGGGCAGC |
| | TLFLVYSNKCQTPLG | AATGAAAACATCCATTCTATTCATTTCAGTGGACATGTGTTCA |
| | MASGHIRDFQITASG | CTGTACGAAAAAAAGAGGAGTATAAAATGGCACTGTACAATC |
| | QYGQWAPKLARLHY | TCTATCCAGGTGTTTTTGAGACAGTGGAAATGTTACCATCCAA |
| | SGSINAWSTKEPFSWI | AGCTGGAATTTGGCGGGTGGAATGCCTTATTGGCGAGCATCTA |
| | KVDLLAPMIIHGIKTQ | CATGCTGGGATGAGCACACTTTTTCTGGTGTACAGCAATAAGT |
| | GARQKFSSLYISQFII | GTCAGACTCCCCTGGGAATGGCTTCTGGACACATTAGAGATTT |
| | MYSLDGKKWQTYRG | TCAGATTACAGCTTCAGGACAATATGGACAGTGGGCCCCAAA |
| | NSTGTLMVFFGNVDS | GCTGGCCAGACTTCATTATTCCGGATCAATCAATGCCTGGAGC |
| | SGIKHNIFNPPIIARYI | ACCAAGGAGCCCTTTTCTTGGATCAAGGTGGATCTGTTGGCAC |
| | RLHPTHYSIRSTLRME | CAATGATTATTCACGGCATCAAGACCCAGGGTGCCCGTCAGAA |
| | LMGCDLNSCSMPLG | GTTCTCCAGCCTCTACATCTCTCAGTTTATCATCATGTATAGTC |
| | MESKAISDAQITASSY | TTGATGGGAAGAAGTGGCAGACTTATCGAGGAAATTCCACTG |
| | FTNMFATWSPSKARL | GAACCTTAATGGTCTTCTTTGGCAATGTGGATTCATCTGGGAT |
| | HLQGRSNAWRPQVN | AAAACACAATATTTTTAACCCTCCAATTATTGCTCGATACATC |
| | NPKEWLQVDFQKTM | CGTTTGCACCCAACTCATTATAGCATTCGCAGCACTCTTCGCAT |
| | KVTGVTTQGVKSLLT | GGAGTTGATGGGCTGTGATTTAAATAGTTGCAGCATGCCATTG |
| | SMYVKEFLISSSQDG | GGAATGGAGAGTAAAGCAATATCAGATGCACAGATTACTGCT |
| | HQWTLFFQNGKVKV | TCATCCTACTTTACCAATATGTTTGCCACCTGGTCTCCTTCAAA |
| | FQGNQDSFTPVVNSL | AGCTCGACTTCACCTCCAAGGGAGGAGTAATGCCTGGAGACCT |
| | DPPLLTRYLRIHPQSW | CAGGTGAATAATCCAAAAGAGTGGCTGCAAGTGGACTTCCAG |
| | VHQIALRMEVLGCEA | AAGACAATGAAAGTCACAGGAGTAACTACTCAGGGAGTAAAA |
| | QDLYGAGSPGAETAE | TCTCTGCTTACCAGCATGTATGTGAAGGAGTTCCTCATCTCCA |
| | QKLISEEDLSPATG | GCAGTCAAGATGGCCATCAGTGGACTCTCTTTTTTCAGAATGG |
| | | CAAAGTAAAGGTTTTTCAGGGAAATCAAGACTCCTTCACACCT |
| | | GTGGTGAACTCTCTAGACCCACCGTTACTGACTCGCTACCTTC |
| | | GAATTCACCCCCAGAGTTGGGTGCACCAGATTGCCCTGAGGAT |
| | | GGAGGTTCTGGGCTGCGAGGCACAGGACCTCTACGGCGCCGG |
| | | ATCACCTGGGGCCGAAACGGCCGAACAAAAACTCATCTCAGA |
| | | AGAGGATCTGTCACCTGCAACCGGTTGA |
| pBC0166 | MQIELSTCFFLCLLRF | ATGCAAATAGAGCTCTCCACCTGCTTCTTTCTGTGCCTTTTGCG |
| | CFSATRRYYLGAVEL | ATTCTGCTTTAGTGCCACCAGAAGATACTACCTGGGTGCAGTG |
| | SWDYMQSDLGELPV | GAACTGTCATGGGACTATATGCAAAGTGATCTCGGTGAGCTGC |
| | DARFPPRVPKSFPFGA | CTGTGGACGCAAGATTTCCTCCTAGAGTGCCAAAATCTTTTCC |
| | PGSPAGSPTSTEEGTS | ATTCGGCGCGCCAGGTTCTCCTGCTGGCTCCCCCACCTCAACA |
| | ESATPESGPGSEPATS | GAAGAGGGGACAAGCGAAAGCGCTACGCCTGAGAGTGGCCCT |
| | GSETPASSNTSVVYK | GGCTCTGAGCCAGCCACCTCCGGCTCTGAAACCCCTGCCTCGA |
| | KTLFVEFTDHLFNIAK | GCAACACCTCAGTCGTGTACAAAAAGACTCTGTTTGTAGAATT |
| | PRPPWMGLLGPTIQA | CACGGATCACCTTTTCAACATCGCTAAGCCAAGGCCACCCTGG |
| | EVYDTVVITLKNMAS | ATGGGTCTGCTAGGTCCTACCATCCAGGCTGAGGTTTATGATA |
| | HPVSLHAVGVSYWK | CAGTGGTCATTACACTTAAGAACATGGCTTCCCATCCTGTCAG |
| | ASEGAEYDDQTSQRE | TCTTCATGCTGTTGGTGTATCCTACTGGAAAGCTTCTGAGGGA |
| | KEDDKVFPGGSHTYV | GCTGAATATGATGATCAGACCAGTCAAAGGGAGAAAGAAGAT |
| | WQVLKENGPMASDP | GATAAAGTCTTCCCTGGTGGAAGCCATACATATGTCTGGCAGG |
| | LCLTYSYLSHVDLVK | TCCTGAAAGAGAATGGTCCAATGGCCTCTGACCCACTGTGCCT |
| | DLNSGLIGALLVCRE | TACCTACTCATATCTTTCTCATGTGGACCTGGTAAAAGACTTG |
| | GSLAKEKTQTLHKFIL | AATTCAGGCCTCATTGGAGCCCTACTAGTATGTAGAGAAGGGA |
| | LFAVFDEGKSWHSET | GTCTGGCCAAGGAAAAGACACAGACCTTGCACAAATTTATACT |
| | KNSLMQDRDAASAR | ACTTTTTGCTGTATTTGATGAAGGGAAAAGTTGGCACTCAGAA |
| | AWPKMHTVNGYVNR | ACAAAGAACTCCTTGATGCAGGATAGGGATGCTGCATCTGCTC |
| | SLPGLIGCHRKSVYW | GGGCCTGGCCTAAAATGCACACAGTCAATGGTTATGTAAACA |
| | HVIGMGTTPEVHSIFL | GGTCTCTGCCAGGTCTGATTGGATGCCACAGGAAATCAGTCTA |
| | EGHTFLVRNHRQASL | TTGGCATGTGATTGGAATGGGCACCACTCCTGAAGTGCACTCA |
| | EISPITFLTAQTLLMD | ATATTCCTCGAAGGTCACACATTTCTTGTGAGGAACCATCGCC |
| | LGQFLLFCHISSHQHD | AGGCTAGCTTGGAAATCTCGCCAATAACTTTCCTTACTGCTCA |
| | GMEAYVKVDSCPEEP | AACACTCTTGATGGACCTTGGACAGTTTCTACTGTTTTGTCATA |
| | QLRMKNNEEAEDYD | TCTCTTCCCACCAACATGATGGCATGGAAGCTTATGTCAAAGT |
| | DDLTDSEMDVVRFD | AGACAGCTGTCCAGAGGAACCCCAACTACGAATGAAAAATAA |
| | DDNSPSFIQIRSVAKK | TGAAGAAGCGGAAGACTATGATGATGATCTTACTGATTCTGAA |
| | HPKTWVHYIAAEEED | ATGGATGTGGTCAGGTTTGATGATGACAACTCTCCTTCCTTTAT |
| | WDYAPLVLAPDDRS | CCAAATTCGCTCAGTTGCCAAGAAGCATCCTAAAACTTGGGTA |
| | YKSQYLNNGPQRIGR | CATTACATTGCTGCTGAAGAGGAGGACTGGGACTATGCTCCCT |
| | KYKKVRFMAYTDET | TAGTCCTCGCCCCCGATGACAGAAGTTATAAAAGTCAATATTT |
| | FKTREAIQHESGILGP | GAACAATGGCCCTCAGCGGATTGGTAGGAAGTACAAAAAAGT |
| | LLYGEVGDTLLIIFKN | CCGATTTATGGCATACACAGATGAAACCTTTAAGACTCGTGAA |
| | QASRPYNIYPHGITDV | GCTATTCAGCATGAATCAGGAATCTTGGGACCTTTACTTTATG |
| | RPLYSRRLPKGVKHL | GGGAAGTTGGAGACACACTGTTGATTATATTTAAGAATCAAGC |
| | KDFPILPGEIFKYKWT | AAGCAGACCATATAACATCTACCCTCACGGAATCACTGATGTC |
| | VTVEDGPTKSDPRCL | CGTCCTTTGTATTCAAGGAGATTACCAAAAGGTGTAAAACATT |
| | TRYYSSFVNMERDLA | TGAAGGATTTTCCAATTCTGCCAGGAGAAATATTCAAATATAA |
| | SGLIGPLLICYKESVD | ATGGACAGTGACTGTAGAAGATGGGCCAACTAAATCAGATCC |
| | QRGNQIMSDKRNVIL | TCGGTGCCTGACCCGCTATTACTCTAGTTTCGTTAATATGGAG |
| | FSVFDENRSWYLTEN | AGAGATCTAGCTTCAGGACTCATTGGCCCTCTCCTCATCTGCT |
| | IQRFLPNPAGVQLEDP | ACAAAGAATCTGTAGATCAAAGAGGAAACCAGATAATGTCAG |
| | EFQASNIMHSINGYVF | ACAAGAGGAATGTCATCCTGTTTTCTGTATTTGATGAGAACCG |
| | DSLQLSVCLHEVAY | AAGCTGGTACCTCACAGAGAATATACAACGCTTTCTCCCCAAT |
| | WYILSIGAQTDFLSVF | CCAGCTGGAGTGCAGCTTGAGGATCCAGAGTTCCAAGCCTCCA |
| | FSGYTFKHKMVYEDT | ACATCATGCACAGCATCAATGGCTATGTTTTTGATAGTTTGCA |
| | LTLFPFSGETVFMSM | GTTGTCAGTTTGTTTGCATGAGGTGGCATACTGGTACATTCTA |
| | ENPGLWILGCHNSDF | AGCATTGGAGCACAGACTGACTTCCTTTCTGTCTTCTTCTCTGG |
| | RNRGMTALLKVSSCD | ATATACCTTCAAACACAAAATGGTCTATGAAGACACACTCACC |
| | KNTGDYYEDSYEDIS | CTATTCCCATTCTCAGGAGAAACTGTCTTCATGTCGATGGAAA |
| | AYLLSKNNAIEPRSFS | ACCCAGGTCTATGGATTCTGGGGTGCCACAACTCAGACTTTCG |
| | QNPPVLKRHQREITR | GAACAGAGGCATGACCGCCTTACTGAAGGTTTCTAGTTGTGAC |
| | TTLQSDQEEIDYDDTI | AAGAACACTGGTGATTATTACGAGGACAGTTATGAAGATATTT |
| | SVEMKKEDFDIYDED | CAGCATACTTGCTGAGTAAAAACAATGCCATTGAACCAAGAA |
| | ENQSPRSFQKKTRHY | GCTTCTCTCAAAACCCACCAGTCTTGAAACGCCATCAACGGGA |
| | FIAAVERLWDYGMSS | AATAACTCGTACTACTCTTCAGTCAGATCAAGAGGAAATCGAT |
| | SPHVLRNRAQSGSVP | TATGATGATACCATATCAGTTGAAATGAAGAAGGAAGATTTTG |
| | QFKKVVFQEFTDGSF | ACATTTATGATGAGGATGAAAATCAGAGCCCCCGCAGCTTTCA |
| | TQPLYRGELNEHLGL | AAAGAAAACACGACACTATTTTATTGCTGCAGTGGAGAGGCTC |
| | LGPYIRAEVEDNIMV | TGGGATTATGGGATGAGTAGCTCCCCACATGTTCTAAGAAACA |
| | TFRNQASRPYSFYSSL | GGGCTCAGAGTGGCAGTGTCCCTCAGTTCAAGAAAGTTGTTTT |
| | ISYEEDQRQGAEPRK | CCAGGAATTTACTGATGGCTCCTTTACTCAGCCCTTATACCGTG |
| | NFVKPNETKTYFWK | GAGAACTAAATGAACATTTGGGACTCCTGGGGCCATATATAA |
| | VQHHMAPTKDEFDC | GAGCAGAAGTTGAAGATAATATCATGGTAACTTTCAGAAATC |
| | KAWAYFSDVDLEKD | AGGCCTCTCGTCCCTATTCCTTCTATTCTAGCCTTATTTCTTATG |
| | VHSGLIGPLLVCHTN | AGGAAGATCAGAGGCAAGGAGCAGAACCTAGAAAAAACTTTG |
| | TLNPAHGRQVTVQEF | TCAAGCCTAATGAAACCAAAACTTACTTTTGGAAAGTGCAACA |
| | ALFFTIFDETKSWYFT | TCATATGGCACCCACTAAAGATGAGTTTGACTGCAAAGCCTGG |
| | ENMERNCRAPCNIQM | GCTTATTTCTCTGATGTTGACCTGGAAAAAGATGTGCACTCAG |
| | EDPTFKENYRFHAIN | GCCTGATTGGACCCCTTCTGGTCTGCCACACTAACACACTGAA |
| | GYIMDTLPGLVMAQ | CCCTGCTCATGGGAGACAAGTGACAGTACAGGAATTTGCTCTG |
| | DQRIRWYLLSMGSNE | TTTTTCACCATCTTTGATGAGACCAAAAGCTGGTACTTCACTG |
| | NIHSIHFSGHVFTVRK | AAAATATGGAAAGAAACTGCAGGGCTCCCTGCAATATCCAGA |
| | KEEYKMALYNLYPG | TGGAAGATCCCACTTTTAAAGAGAATTATCGCTTCCATGCAAT |
| | VFETVEMLPSKAGIW | CAATGGCTACATAATGGATACACTACCTGGCTTAGTAATGGCT |
| | RVECLIGEHLHAGMS | CAGGATCAAAGGATTCGATGGTATCTGCTCAGCATGGGCAGC |
| | TLFLVYSNKCQTPLG | AATGAAAACATCCATTCTATTCATTTCAGTGGACATGTGTTCA |
| | MASGHIRDFQITASG | CTGTACGAAAAAAAGAGGAGTATAAAATGGCACTGTACAATC |
| | QYGQWAPKLARLHY | TCTATCCAGGTGTTTTTGAGACAGTGGAAATGTTACCATCCAA |
| | SGSINAWSTKEPFSWI | AGCTGGAATTTGGCGGGTGGAATGCCTTATTGGCGAGCATCTA |
| | KVDLLAPMIIHGIKTQ | CATGCTGGGATGAGCACACTTTTTCTGGTGTACAGCAATAAGT |
| | GARQKFSSLYISQFII | GTCAGACTCCCCTGGGAATGGCTTCTGGACACATTAGAGATTT |
| | MYSLDGKKWQTYRG | TCAGATTACAGCTTCAGGACAATATGGACAGTGGGCCCCAAA |
| | NSTGTLMVFFGNVDS | GCTGGCCAGACTTCATTATTCCGGATCAATCAATGCCTGGAGC |
| | SGIKHNIFNPPIIARYI | ACCAAGGAGCCCTTTTCTTGGATCAAGGTGGATCTGTTGGCAC |
| | RLHPTHYSIRSTLRME | CAATGATTATTCACGGCATCAAGACCCAGGGTGCCCGTCAGAA |
| | LMGCDLNSCSMPLG | GTTCTCCAGCCTCTACATCTCTCAGTTTATCATCATGTATAGTC |
| | MESKAISDAQITASSY | TTGATGGGAAGAAGTGGCAGACTTATCGAGGAAATTCCACTG |
| | FTNMFATWSPSKARL | GAACCTTAATGGTCTTCTTTGGCAATGTGGATTCATCTGGGAT |
| | HLQGRSNAWRPQVN | AAAACACAATATTTTTAACCCTCCAATTATTGCTCGATACATC |
| | NPKEWLQVDFQKTM | CGTTTGCACCCAACTCATTATAGCATTCGCAGCACTCTTCGCAT |
| | KVTGVTTQGVKSLLT | GGAGTTGATGGGCTGTGATTTAAATAGTTGCAGCATGCCATTG |
| | SMYVKEFLISSSQDG | GGAATGGAGAGTAAAGCAATATCAGATGCACAGATTACTGCT |
| | HQWTLFFQNGKVKV | TCATCCTACTTTACCAATATGTTTGCCACCTGGTCTCCTTCAAA |
| | FQGNQDSFTPVVNSL | AGCTCGACTTCACCTCCAAGGGAGGAGTAATGCCTGGAGACCT |
| | DPPLLTRYLRIHPQSW | CAGGTGAATAATCCAAAAGAGTGGCTGCAAGTGGACTTCCAG |
| | VHQIALRMEVLGCEA | AAGACAATGAAAGTCACAGGAGTAACTACTCAGGGAGTAAAA |
| | QDLYGAGSPGAETAE | TCTCTGCTTACCAGCATGTATGTGAAGGAGTTCCTCATCTCCA |
| | QKLISEEDLSPATG | GCAGTCAAGATGGCCATCAGTGGACTCTCTTTTTTCAGAATGG |
| | | CAAAGTAAAGGTTTTTCAGGGAAATCAAGACTCCTTCACACCT |
| | | GTGGTGAACTCTCTAGACCCACCGTTACTGACTCGCTACCTTC |
| | | GAATTCACCCCCAGAGTTGGGTGCACCAGATTGCCCTGAGGAT |
| | | GGAGGTTCTGGGCTGCGAGGCACAGGACCTCTACGGCGCCGG |
| | | ATCACCTGGGGCCGAAACGGCCGAACAAAAACTCATCTCAGA |
| | | AGAGGATCTGTCACCTGCAACCGGTTGA |
| pBC0185 | MQIELSTCFFLCLLRF | ATGCAAATAGAGCTCTCCACCTGCTTCTTTCTGTGCCTTTTGCG |
| | CFSATRRYYLGAVEL | ATTCTGCTTTAGTGCCACCAGAAGATACTACCTGGGTGCAGTG |
| | SWDYMQSDLGELPV | GAACTGTCATGGGACTATATGCAAAGTGATCTCGGTGAGCTGC |
| | DARFPPRVPKSFPFNT | CTGTGGACGCAAGATTTCCTCCTAGAGTGCCAAAATCTTTTCC |
| | SVVYKKTLFVEFTDH | ATTCAACACCTCAGTCGTGTACAAAAAGACTCTGTTTGTAGAA |
| | LFNGAPGSPAGSPTST | TTCACGGATCACCTTTTCAACGGCGCGCCAGGTTCTCCTGCTG |
| | EEGTSESATPESGPGS | GCTCCCCCACCTCAACAGAAGAGGGGACAAGCGAAAGCGCTA |
| | EPATSGSETPASSIAK | CGCCTGAGAGTGGCCCTGGCTCTGAGCCAGCCACCTCCGGCTC |
| | PRPPWMGLLGPTIQA | TGAAACCCCTGCCTCGAGCATCGCTAAGCCAAGGCCACCCTGG |
| | EVYDTVVITLKNMAS | ATGGGTCTGCTAGGTCCTACCATCCAGGCTGAGGTTTATGATA |
| | HPVSLHAVGVSYWK | CAGTGGTCATTACACTTAAGAACATGGCTTCCCATCCTGTCAG |
| | ASEGAEYDDQTSQRE | TCTTCATGCTGTTGGTGTATCCTACTGGAAAGCTTCTGAGGGA |
| | KEDDKVFPGGSHTYV | GCTGAATATGATGATCAGACCAGTCAAAGGGAGAAAGAAGAT |
| | WQVLKENGPMASDP | GATAAAGTCTTCCCTGGTGGAAGCCATACATATGTCTGGCAGG |
| | LCLTYSYLSHVDLVK | TCCTGAAAGAGAATGGTCCAATGGCCTCTGACCCACTGTGCCT |
| | DLNSGLIGALLVCRE | TACCTACTCATATCTTTCTCATGTGGACCTGGTAAAAGACTTG |
| | GSLAKEKTQTLHKFIL | AATTCAGGCCTCATTGGAGCCCTACTAGTATGTAGAGAAGGGA |
| | LFAVFDEGKSWHSET | GTCTGGCCAAGGAAAAGACACAGACCTTGCACAAATTTATACT |
| | KNSLMQDRDAASAR | ACTTTTTGCTGTATTTGATGAAGGGAAAAGTTGGCACTCAGAA |
| | AWPKMHTVNGYVNR | ACAAAGAACTCCTTGATGCAGGATAGGGATGCTGCATCTGCTC |
| | SLPGLIGCHRKSVYW | GGGCCTGGCCTAAAATGCACACAGTCAATGGTTATGTAAACA |
| | HVIGMGTTPEVHSIFL | GGTCTCTGCCAGGTCTGATTGGATGCCACAGGAAATCAGTCTA |
| | EGHTFLVRNHRQASL | TTGGCATGTGATTGGAATGGGCACCACTCCTGAAGTGCACTCA |
| | EISPITFLTAQTLLMD | ATATTCCTCGAAGGTCACACATTTCTTGTGAGGAACCATCGCC |
| | LGQFLLFCHISSHQHD | AGGCTAGCTTGGAAATCTCGCCAATAACTTTCCTTACTGCTCA |
| | GMEAYVKVDSCPEEP | AACACTCTTGATGGACCTTGGACAGTTTCTACTGTTTTGTCATA |
| | QLRMKNNEEAEDYD | TCTCTTCCCACCAACATGATGGCATGGAAGCTTATGTCAAAGT |
| | DDLTDSEMDVVRFD | AGACAGCTGTCCAGAGGAACCCCAACTACGAATGAAAAATAA |
| | DDNSPSFIQIRSVAKK | TGAAGAAGCGGAAGACTATGATGATGATCTTACTGATTCTGAA |
| | HPKTWVHYIAAEEED | ATGGATGTGGTCAGGTTTGATGATGACAACTCTCCTTCCTTTAT |
| | WDYAPLVLAPDDRS | CCAAATTCGCTCAGTTGCCAAGAAGCATCCTAAAACTTGGGTA |
| | YKSQYLNNGPQRIGR | CATTACATTGCTGCTGAAGAGGAGGACTGGGACTATGCTCCCT |
| | KYKKVRFMAYTDET | TAGTCCTCGCCCCCGATGACAGAAGTTATAAAAGTCAATATTT |
| | FKTREAIQHESGILGP | GAACAATGGCCCTCAGCGGATTGGTAGGAAGTACAAAAAAGT |
| | LLYGEVGDTLLIIFKN | CCGATTTATGGCATACACAGATGAAACCTTTAAGACTCGTGAA |
| | QASRPYNIYPHGITDV | GCTATTCAGCATGAATCAGGAATCTTGGGACCTTTACTTTATG |
| | RPLYSRRLPKGVKHL | GGGAAGTTGGAGACACACTGTTGATTATATTTAAGAATCAAGC |
| | KDFPILPGEIFKYKWT | AAGCAGACCATATAACATCTACCCTCACGGAATCACTGATGTC |
| | VTVEDGPTKSDPRCL | CGTCCTTTGTATTCAAGGAGATTACCAAAAGGTGTAAAACATT |
| | TRYYSSFVNMERDLA | TGAAGGATTTTCCAATTCTGCCAGGAGAAATATTCAAATATAA |
| | SGLIGPLLICYKESVD | ATGGACAGTGACTGTAGAAGATGGGCCAACTAAATCAGATCC |
| | QRGNQIMSDKRNVIL | TCGGTGCCTGACCCGCTATTACTCTAGTTTCGTTAATATGGAG |
| | FSVFDENRSWYLTEN | AGAGATCTAGCTTCAGGACTCATTGGCCCTCTCCTCATCTGCT |
| | IQRFLPNPAGVQLEDP | ACAAAGAATCTGTAGATCAAAGAGGAAACCAGATAATGTCAG |
| | EFQASNIMHSINGYVF | ACAAGAGGAATGTCATCCTGTTTTCTGTATTTGATGAGAACCG |
| | DSLQLSVCLHEVAY | AAGCTGGTACCTCACAGAGAATATACAACGCTTTCTCCCCAAT |
| | WYILSIGAQTDFLSVF | CCAGCTGGAGTGCAGCTTGAGGATCCAGAGTTCCAAGCCTCCA |
| | FSGYTFKHKMVYEDT | ACATCATGCACAGCATCAATGGCTATGTTTTTGATAGTTTGCA |
| | LTLFPFSGETVFMSM | GTTGTCAGTTTGTTTGCATGAGGTGGCATACTGGTACATTCTA |
| | ENPGLWILGCHNSDF | AGCATTGGAGCACAGACTGACTTCCTTTCTGTCTTCTTCTCTGG |
| | RNRGMTALLKVSSCD | ATATACCTTCAAACACAAAATGGTCTATGAAGACACACTCACC |
| | KNTGDYYEDSYEDIS | CTATTCCCATTCTCAGGAGAAACTGTCTTCATGTCGATGGAAA |
| | AYLLSKNNAIEPRSFS | ACCCAGGTCTATGGATTCTGGGGTGCCACAACTCAGACTTTCG |
| | QNPPVLKRHQREITR | GAACAGAGGCATGACCGCCTTACTGAAGGTTTCTAGTTGTGAC |
| | TTLQSDQEEIDYDDTI | AAGAACACTGGTGATTATTACGAGGACAGTTATGAAGATATTT |
| | SVEMKKEDFDIYDED | CAGCATACTTGCTGAGTAAAAACAATGCCATTGAACCAAGAA |
| | ENQSPRSFQKKTRHY | GCTTCTCTCAAAACCCACCAGTCTTGAAACGCCATCAACGGGA |
| | FIAAVERLWDYGMSS | AATAACTCGTACTACTCTTCAGTCAGATCAAGAGGAAATCGAT |
| | SPHVLRNRAQSGSVP | TATGATGATACCATATCAGTTGAAATGAAGAAGGAAGATTTTG |
| | QFKKVVFQEFTDGSF | ACATTTATGATGAGGATGAAAATCAGAGCCCCCGCAGCTTTCA |
| | TQPLYRGELNEHLGL | AAAGAAAACACGACACTATTTTATTGCTGCAGTGGAGAGGCTC |
| | LGPYIRAEVEDNIMV | TGGGATTATGGGATGAGTAGCTCCCCACATGTTCTAAGAAACA |
| | TFRNQASRPYSFYSSL | GGGCTCAGAGTGGCAGTGTCCCTCAGTTCAAGAAAGTTGTTTT |
| | ISYEEDQRQGAEPRK | CCAGGAATTTACTGATGGCTCCTTTACTCAGCCCTTATACCGTG |
| | NFVKPNETKTYFWK | GAGAACTAAATGAACATTTGGGACTCCTGGGGCCATATATAA |
| | VQHHMAPTKDEFDC | GAGCAGAAGTTGAAGATAATATCATGGTAACTTTCAGAAATC |
| | KAWAYFSDVDLEKD | AGGCCTCTCGTCCCTATTCCTTCTATTCTAGCCTTATTTCTTATG |
| | VHSGLIGPLLVCHTN | AGGAAGATCAGAGGCAAGGAGCAGAACCTAGAAAAAACTTTG |
| | TLNPAHGRQVTVQEF | TCAAGCCTAATGAAACCAAAACTTACTTTTGGAAAGTGCAACA |
| | ALFFTIFDETKSWYFT | TCATATGGCACCCACTAAAGATGAGTTTGACTGCAAAGCCTGG |
| | ENMERNCRAPCNIQM | GCTTATTTCTCTGATGTTGACCTGGAAAAAGATGTGCACTCAG |
| | EDPTFKENYRFHAIN | GCCTGATTGGACCCCTTCTGGTCTGCCACACTAACACACTGAA |
| | GYIMDTLPGLVMAQ | CCCTGCTCATGGGAGACAAGTGACAGTACAGGAATTTGCTCTG |
| | DQRIRWYLLSMGSNE | TTTTTCACCATCTTTGATGAGACCAAAAGCTGGTACTTCACTG |
| | NIHSIHFSGHVFTVRK | AAAATATGGAAAGAAACTGCAGGGCTCCCTGCAATATCCAGA |
| | KEEYKMALYNLYPG | TGGAAGATCCCACTTTTAAAGAGAATTATCGCTTCCATGCAAT |
| | VFETVEMLPSKAGIW | CAATGGCTACATAATGGATACACTACCTGGCTTAGTAATGGCT |
| | RVECLIGEHLHAGMS | CAGGATCAAAGGATTCGATGGTATCTGCTCAGCATGGGCAGC |
| | TLFLVYSNKCQTPLG | AATGAAAACATCCATTCTATTCATTTCAGTGGACATGTGTTCA |
| | MASGHIRDFQITASG | CTGTACGAAAAAAAGAGGAGTATAAAATGGCACTGTACAATC |
| | QYGQWAPKLARLHY | TCTATCCAGGTGTTTTTGAGACAGTGGAAATGTTACCATCCAA |
| | SGSINAWSTKEPFSWI | AGCTGGAATTTGGCGGGTGGAATGCCTTATTGGCGAGCATCTA |
| | KVDLLAPMIIHGIKTQ | CATGCTGGGATGAGCACACTTTTTCTGGTGTACAGCAATAAGT |
| | GARQKFSSLYISQFII | GTCAGACTCCCCTGGGAATGGCTTCTGGACACATTAGAGATTT |
| | MYSLDGKKWQTYRG | TCAGATTACAGCTTCAGGACAATATGGACAGTGGGCCCCAAA |
| | NSTGTLMVFFGNVDS | GCTGGCCAGACTTCATTATTCCGGATCAATCAATGCCTGGAGC |
| | SGIKHNIFNPPIIARYI | ACCAAGGAGCCCTTTTCTTGGATCAAGGTGGATCTGTTGGCAC |
| | RLHPTHYSIRSTLRME | CAATGATTATTCACGGCATCAAGACCCAGGGTGCCCGTCAGAA |
| | LMGCDLNSCSMPLG | GTTCTCCAGCCTCTACATCTCTCAGTTTATCATCATGTATAGTC |
| | MESKAISDAQITASSY | TTGATGGGAAGAAGTGGCAGACTTATCGAGGAAATTCCACTG |
| | FTNMFATWSPSKARL | GAACCTTAATGGTCTTCTTTGGCAATGTGGATTCATCTGGGAT |
| | HLQGRSNAWRPQVN | AAAACACAATATTTTTAACCCTCCAATTATTGCTCGATACATC |
| | NPKEWLQVDFQKTM | CGTTTGCACCCAACTCATTATAGCATTCGCAGCACTCTTCGCAT |
| | KVTGVTTQGVKSLLT | GGAGTTGATGGGCTGTGATTTAAATAGTTGCAGCATGCCATTG |
| | SMYVKEFLISSSQDG | GGAATGGAGAGTAAAGCAATATCAGATGCACAGATTACTGCT |
| | HQWTLFFQNGKVKV | TCATCCTACTTTACCAATATGTTTGCCACCTGGTCTCCTTCAAA |
| | FQGNQDSFTPVVNSL | AGCTCGACTTCACCTCCAAGGGAGGAGTAATGCCTGGAGACCT |
| | DPPLLTRYLRIHPQSW | CAGGTGAATAATCCAAAAGAGTGGCTGCAAGTGGACTTCCAG |
| | VHQIALRMEVLGCEA | AAGACAATGAAAGTCACAGGAGTAACTACTCAGGGAGTAAAA |
| | QDLYGAGSPGAETAE | TCTCTGCTTACCAGCATGTATGTGAAGGAGTTCCTCATCTCCA |
| | QKLISEEDLSPATG | GCAGTCAAGATGGCCATCAGTGGACTCTCTTTTTTCAGAATGG |
| | | CAAAGTAAAGGTTTTTCAGGGAAATCAAGACTCCTTCACACCT |
| | | GTGGTGAACTCTCTAGACCCACCGTTACTGACTCGCTACCTTC |
| | | GAATTCACCCCCAGAGTTGGGTGCACCAGATTGCCCTGAGGAT |
| | | GGAGGTTCTGGGCTGCGAGGCACAGGACCTCTACGGCGCCGG |
| | | ATCACCTGGGGCCGAAACGGCCGAACAAAAACTCATCTCAGA |
| | | AGAGGATCTGTCACCTGCAACCGGTTGA |
| pBC0167 | MQIELSTCFFLCLLRF | ATGCAAATAGAGCTCTCCACCTGCTTCTTTCTGTGCCTTTTGCG |
| | CFSATRRYYLGAVEL | ATTCTGCTTTAGTGCCACCAGAAGATACTACCTGGGTGCAGTG |
| | SWDYMQSDLGELPV | GAACTGTCATGGGACTATATGCAAAGTGATCTCGGTGAGCTGC |
| | DARFPPRVPKSFPFNT | CTGTGGACGCAAGATTTCCTCCTAGAGTGCCAAAATCTTTTCC |
| | SVVYKKTLFVEFTDH | ATTCAACACCTCAGTCGTGTACAAAAAGACTCTGTTTGTAGAA |
| | LFNIAKPRPPWMGLL | TTCACGGATCACCTTTTCAACATCGCTAAGCCAAGGCCACCCT |
| | GPTIQAEVYDTVVITL | GGATGGGTCTGCTAGGTCCTACCATCCAGGCTGAGGTTTATGA |
| | KNMASHPVSLHAVG | TACAGTGGTCATTACACTTAAGAACATGGCTTCCCATCCTGTC |
| | VSYWKASEGAEYDD | AGTCTTCATGCTGTTGGTGTATCCTACTGGAAAGCTTCTGAGG |
| | GAPGSPAGSPTSTEEG | GAGCTGAATATGATGATGGCGCGCCAGGTTCTCCTGCTGGCTC |
| | TSESATPESGPGSEPA | CCCCACCTCAACAGAAGAGGGGACAAGCGAAAGCGCTACGCC |
| | TSGSETPASSQTSQRE | TGAGAGTGGCCCTGGCTCTGAGCCAGCCACCTCCGGCTCTGAA |
| | KEDDKVFPGGSHTYV | ACCCCTGCCTCGAGCCAGACCAGTCAAAGGGAGAAAGAAGAT |
| | WQVLKENGPMASDP | GATAAAGTCTTCCCTGGTGGAAGCCATACATATGTCTGGCAGG |
| | LCLTYSYLSHVDLVK | TCCTGAAAGAGAATGGTCCAATGGCCTCTGACCCACTGTGCCT |
| | DLNSGLIGALLVCRE | TACCTACTCATATCTTTCTCATGTGGACCTGGTAAAAGACTTG |
| | GSLAKEKTQTLHKFIL | AATTCAGGCCTCATTGGAGCCCTACTAGTATGTAGAGAAGGGA |
| | LFAVFDEGKSWHSET | GTCTGGCCAAGGAAAAGACACAGACCTTGCACAAATTTATACT |
| | KNSLMQDRDAASAR | ACTTTTTGCTGTATTTGATGAAGGGAAAAGTTGGCACTCAGAA |
| | AWPKMHTVNGYVNR | ACAAAGAACTCCTTGATGCAGGATAGGGATGCTGCATCTGCTC |
| | SLPGLIGCHRKSVYW | GGGCCTGGCCTAAAATGCACACAGTCAATGGTTATGTAAACA |
| | HVIGMGTTPEVHSIFL | GGTCTCTGCCAGGTCTGATTGGATGCCACAGGAAATCAGTCTA |
| | EGHTFLVRNHRQASL | TTGGCATGTGATTGGAATGGGCACCACTCCTGAAGTGCACTCA |
| | EISPITFLTAQTLLMD | ATATTCCTCGAAGGTCACACATTTCTTGTGAGGAACCATCGCC |
| | LGQFLLFCHISSHQHD | AGGCTAGCTTGGAAATCTCGCCAATAACTTTCCTTACTGCTCA |
| | GMEAYVKVDSCPEEP | AACACTCTTGATGGACCTTGGACAGTTTCTACTGTTTTGTCATA |
| | QLRMKNNEEAEDYD | TCTCTTCCCACCAACATGATGGCATGGAAGCTTATGTCAAAGT |
| | DDLTDSEMDVVRFD | AGACAGCTGTCCAGAGGAACCCCAACTACGAATGAAAAATAA |
| | DDNSPSFIQIRSVAKK | TGAAGAAGCGGAAGACTATGATGATGATCTTACTGATTCTGAA |
| | HPKTWVHYIAAEEED | ATGGATGTGGTCAGGTTTGATGATGACAACTCTCCTTCCTTTAT |
| | WDYAPLVLAPDDRS | CCAAATTCGCTCAGTTGCCAAGAAGCATCCTAAAACTTGGGTA |
| | YKSQYLNNGPQRIGR | CATTACATTGCTGCTGAAGAGGAGGACTGGGACTATGCTCCCT |
| | KYKKVRFMAYTDET | TAGTCCTCGCCCCCGATGACAGAAGTTATAAAAGTCAATATTT |
| | FKTREAIQHESGILGP | GAACAATGGCCCTCAGCGGATTGGTAGGAAGTACAAAAAAGT |
| | LLYGEVGDTLLIIFKN | CCGATTTATGGCATACACAGATGAAACCTTTAAGACTCGTGAA |
| | QASRPYNIYPHGITDV | GCTATTCAGCATGAATCAGGAATCTTGGGACCTTTACTTTATG |
| | RPLYSRRLPKGVKHL | GGGAAGTTGGAGACACACTGTTGATTATATTTAAGAATCAAGC |
| | KDFPILPGEIFKYKWT | AAGCAGACCATATAACATCTACCCTCACGGAATCACTGATGTC |
| | VTVEDGPTKSDPRCL | CGTCCTTTGTATTCAAGGAGATTACCAAAAGGTGTAAAACATT |
| | TRYYSSFVNMERDLA | TGAAGGATTTTCCAATTCTGCCAGGAGAAATATTCAAATATAA |
| | SGLIGPLLICYKESVD | ATGGACAGTGACTGTAGAAGATGGGCCAACTAAATCAGATCC |
| | QRGNQIMSDKRNVIL | TCGGTGCCTGACCCGCTATTACTCTAGTTTCGTTAATATGGAG |
| | FSVFDENRSWYLTEN | AGAGATCTAGCTTCAGGACTCATTGGCCCTCTCCTCATCTGCT |
| | IQRFLPNPAGVQLEDP | ACAAAGAATCTGTAGATCAAAGAGGAAACCAGATAATGTCAG |
| | EFQASNIMHSINGYVF | ACAAGAGGAATGTCATCCTGTTTTCTGTATTTGATGAGAACCG |
| | DSLQLSVCLHEVAY | AAGCTGGTACCTCACAGAGAATATACAACGCTTTCTCCCCAAT |
| | WYILSIGAQTDFLSVF | CCAGCTGGAGTGCAGCTTGAGGATCCAGAGTTCCAAGCCTCCA |
| | FSGYTFKHKMVYEDT | ACATCATGCACAGCATCAATGGCTATGTTTTTGATAGTTTGCA |
| | LTLFPFSGETVFMSM | GTTGTCAGTTTGTTTGCATGAGGTGGCATACTGGTACATTCTA |
| | ENPGLWILGCHNSDF | AGCATTGGAGCACAGACTGACTTCCTTTCTGTCTTCTTCTCTGG |
| | RNRGMTALLKVSSCD | ATATACCTTCAAACACAAAATGGTCTATGAAGACACACTCACC |
| | KNTGDYYEDSYEDIS | CTATTCCCATTCTCAGGAGAAACTGTCTTCATGTCGATGGAAA |
| | AYLLSKNNAIEPRSFS | ACCCAGGTCTATGGATTCTGGGGTGCCACAACTCAGACTTTCG |
| | QNPPVLKRHQREITR | GAACAGAGGCATGACCGCCTTACTGAAGGTTTCTAGTTGTGAC |
| | TTLQSDQEEIDYDDTI | AAGAACACTGGTGATTATTACGAGGACAGTTATGAAGATATTT |
| | SVEMKKEDFDIYDED | CAGCATACTTGCTGAGTAAAAACAATGCCATTGAACCAAGAA |
| | ENQSPRSFQKKTRHY | GCTTCTCTCAAAACCCACCAGTCTTGAAACGCCATCAACGGGA |
| | FIAAVERLWDYGMSS | AATAACTCGTACTACTCTTCAGTCAGATCAAGAGGAAATCGAT |
| | SPHVLRNRAQSGSVP | TATGATGATACCATATCAGTTGAAATGAAGAAGGAAGATTTTG |
| | QFKKVVFQEFTDGSF | ACATTTATGATGAGGATGAAAATCAGAGCCCCCGCAGCTTTCA |
| | TQPLYRGELNEHLGL | AAAGAAAACACGACACTATTTTATTGCTGCAGTGGAGAGGCTC |
| | LGPYIRAEVEDNIMV | TGGGATTATGGGATGAGTAGCTCCCCACATGTTCTAAGAAACA |
| | TFRNQASRPYSFYSSL | GGGCTCAGAGTGGCAGTGTCCCTCAGTTCAAGAAAGTTGTTTT |
| | ISYEEDQRQGAEPRK | CCAGGAATTTACTGATGGCTCCTTTACTCAGCCCTTATACCGTG |
| | NFVKPNETKTYFWK | GAGAACTAAATGAACATTTGGGACTCCTGGGGCCATATATAA |
| | VQHHMAPTKDEFDC | GAGCAGAAGTTGAAGATAATATCATGGTAACTTTCAGAAATC |
| | KAWAYFSDVDLEKD | AGGCCTCTCGTCCCTATTCCTTCTATTCTAGCCTTATTTCTTATG |
| | VHSGLIGPLLVCHTN | AGGAAGATCAGAGGCAAGGAGCAGAACCTAGAAAAAACTTTG |
| | TLNPAHGRQVTVQEF | TCAAGCCTAATGAAACCAAAACTTACTTTTGGAAAGTGCAACA |
| | ALFFTIFDETKSWYFT | TCATATGGCACCCACTAAAGATGAGTTTGACTGCAAAGCCTGG |
| | ENMERNCRAPCNIQM | GCTTATTTCTCTGATGTTGACCTGGAAAAAGATGTGCACTCAG |
| | EDPTFKENYRFHAIN | GCCTGATTGGACCCCTTCTGGTCTGCCACACTAACACACTGAA |
| | GYIMDTLPGLVMAQ | CCCTGCTCATGGGAGACAAGTGACAGTACAGGAATTTGCTCTG |
| | DQRIRWYLLSMGSNE | TTTTTCACCATCTTTGATGAGACCAAAAGCTGGTACTTCACTG |
| | NIHSIHFSGHVFTVRK | AAAATATGGAAAGAAACTGCAGGGCTCCCTGCAATATCCAGA |
| | KEEYKMALYNLYPG | TGGAAGATCCCACTTTTAAAGAGAATTATCGCTTCCATGCAAT |
| | VFETVEMLPSKAGIW | CAATGGCTACATAATGGATACACTACCTGGCTTAGTAATGGCT |
| | RVECLIGEHLHAGMS | CAGGATCAAAGGATTCGATGGTATCTGCTCAGCATGGGCAGC |
| | TLFLVYSNKCQTPLG | AATGAAAACATCCATTCTATTCATTTCAGTGGACATGTGTTCA |
| | MASGHIRDFQITASG | CTGTACGAAAAAAAGAGGAGTATAAAATGGCACTGTACAATC |
| | QYGQWAPKLARLHY | TCTATCCAGGTGTTTTTGAGACAGTGGAAATGTTACCATCCAA |
| | SGSINAWSTKEPFSWI | AGCTGGAATTTGGCGGGTGGAATGCCTTATTGGCGAGCATCTA |
| | KVDLLAPMIIHGIKTQ | CATGCTGGGATGAGCACACTTTTTCTGGTGTACAGCAATAAGT |
| | GARQKFSSLYISQFII | GTCAGACTCCCCTGGGAATGGCTTCTGGACACATTAGAGATTT |
| | MYSLDGKKWQTYRG | TCAGATTACAGCTTCAGGACAATATGGACAGTGGGCCCCAAA |
| | NSTGTLMVFFGNVDS | GCTGGCCAGACTTCATTATTCCGGATCAATCAATGCCTGGAGC |
| | SGIKHNIFNPPIIARYI | ACCAAGGAGCCCTTTTCTTGGATCAAGGTGGATCTGTTGGCAC |
| | RLHPTHYSIRSTLRME | CAATGATTATTCACGGCATCAAGACCCAGGGTGCCCGTCAGAA |
| | LMGCDLNSCSMPLG | GTTCTCCAGCCTCTACATCTCTCAGTTTATCATCATGTATAGTC |
| | MESKAISDAQITASSY | TTGATGGGAAGAAGTGGCAGACTTATCGAGGAAATTCCACTG |
| | FTNMFATWSPSKARL | GAACCTTAATGGTCTTCTTTGGCAATGTGGATTCATCTGGGAT |
| | HLQGRSNAWRPQVN | AAAACACAATATTTTTAACCCTCCAATTATTGCTCGATACATC |
| | NPKEWLQVDFQKTM | CGTTTGCACCCAACTCATTATAGCATTCGCAGCACTCTTCGCAT |
| | KVTGVTTQGVKSLLT | GGAGTTGATGGGCTGTGATTTAAATAGTTGCAGCATGCCATTG |
| | SMYVKEFLISSSQDG | GGAATGGAGAGTAAAGCAATATCAGATGCACAGATTACTGCT |
| | HQWTLFFQNGKVKV | TCATCCTACTTTACCAATATGTTTGCCACCTGGTCTCCTTCAAA |
| | FQGNQDSFTPVVNSL | AGCTCGACTTCACCTCCAAGGGAGGAGTAATGCCTGGAGACCT |
| | DPPLLTRYLRIHPQSW | CAGGTGAATAATCCAAAAGAGTGGCTGCAAGTGGACTTCCAG |
| | VHQIALRMEVLGCEA | AAGACAATGAAAGTCACAGGAGTAACTACTCAGGGAGTAAAA |
| | QDLYGAGSPGAETAE | TCTCTGCTTACCAGCATGTATGTGAAGGAGTTCCTCATCTCCA |
| | QKLISEEDLSPATG | GCAGTCAAGATGGCCATCAGTGGACTCTCTTTTTTCAGAATGG |
| | | CAAAGTAAAGGTTTTTCAGGGAAATCAAGACTCCTTCACACCT |
| | | GTGGTGAACTCTCTAGACCCACCGTTACTGACTCGCTACCTTC |
| | | GAATTCACCCCCAGAGTTGGGTGCACCAGATTGCCCTGAGGAT |
| | | GGAGGTTCTGGGCTGCGAGGCACAGGACCTCTACGGCGCCGG |
| | | ATCACCTGGGGCCGAAACGGCCGAACAAAAACTCATCTCAGA |
| | | AGAGGATCTGTCACCTGCAACCGGTTGA |
| pBC0128 | MQIELSTCFFLCLLRF | ATGCAAATAGAGCTCTCCACCTGCTTCTTTCTGTGCCTTTTGCG |
| | CFSATRRYYLGAVEL | ATTCTGCTTTAGTGCCACCAGAAGATACTACCTGGGTGCAGTG |
| | SWDYMQSDLGELPV | GAACTGTCATGGGACTATATGCAAAGTGATCTCGGTGAGCTGC |
| | DARFPPRVPKSFPFNT | CTGTGGACGCAAGATTTCCTCCTAGAGTGCCAAAATCTTTTCC |
| | SVVYKKTLFVEFTDH | ATTCAACACCTCAGTCGTGTACAAAAAGACTCTGTTTGTAGAA |
| | LFNIAKPRPPWMGLL | TTCACGGATCACCTTTTCAACATCGCTAAGCCAAGGCCACCCT |
| | GPTIQAEVYDTVVITL | GGATGGGTCTGCTAGGTCCTACCATCCAGGCTGAGGTTTATGA |
| | KNMASHPVSLHAVG | TACAGTGGTCATTACACTTAAGAACATGGCTTCCCATCCTGTC |
| | VSYWKASEGAEYDD | AGTCTTCATGCTGTTGGTGTATCCTACTGGAAAGCTTCTGAGG |
| | QTSQREKEDDKVFPG | GAGCTGAATATGATGATCAGACCAGTCAAAGGGAGAAAGAAG |
| | APGSPAGSPTSTEEGT | ATGATAAAGTCTTCCCTGGCGCGCCAGGTTCTCCTGCTGGCTC |
| | SESATPESGPGSEPAT | CCCCACCTCAACAGAAGAGGGGACAAGCGAAAGCGCTACGCC |
| | SGSETPASSGGSHTY | TGAGAGTGGCCCTGGCTCTGAGCCAGCCACCTCCGGCTCTGAA |
| | VWQVLKENGPMASD | ACCCCTGCCTCGAGCGGTGGAAGCCATACATATGTCTGGCAGG |
| | PLCLTYSYLSHVDLV | TCCTGAAAGAGAATGGTCCAATGGCCTCTGACCCACTGTGCCT |
| | KDLNSGLIGALLVCR | TACCTACTCATATCTTTCTCATGTGGACCTGGTAAAAGACTTG |
| | EGSLAKEKTQTLHKFI | AATTCAGGCCTCATTGGAGCCCTACTAGTATGTAGAGAAGGGA |
| | LLFAVFDEGKSWHSE | GTCTGGCCAAGGAAAAGACACAGACCTTGCACAAATTTATACT |
| | TKNSLMQDRDAASA | ACTTTTTGCTGTATTTGATGAAGGGAAAAGTTGGCACTCAGAA |
| | RAWPKMHTVNGYVN | ACAAAGAACTCCTTGATGCAGGATAGGGATGCTGCATCTGCTC |
| | RSLPGLIGCHRKSVY | GGGCCTGGCCTAAAATGCACACAGTCAATGGTTATGTAAACA |
| | WHVIGMGTTPEVHSI | GGTCTCTGCCAGGTCTGATTGGATGCCACAGGAAATCAGTCTA |
| | FLEGHTFLVRNHRQA | TTGGCATGTGATTGGAATGGGCACCACTCCTGAAGTGCACTCA |
| | SLEISPITFLTAQTLLM | ATATTCCTCGAAGGTCACACATTTCTTGTGAGGAACCATCGCC |
| | DLGQFLLFCHISSHQH | AGGCTAGCTTGGAAATCTCGCCAATAACTTTCCTTACTGCTCA |
| | DGMEAYVKVDSCPE | AACACTCTTGATGGACCTTGGACAGTTTCTACTGTTTTGTCATA |
| | EPQLRMKNNEEAED | TCTCTTCCCACCAACATGATGGCATGGAAGCTTATGTCAAAGT |
| | YDDDLTDSEMDVVR | AGACAGCTGTCCAGAGGAACCCCAACTACGAATGAAAAATAA |
| | FDDDNSPSFIQIRSVA | TGAAGAAGCGGAAGACTATGATGATGATCTTACTGATTCTGAA |
| | KKHPKTWVHYIAAEE | ATGGATGTGGTCAGGTTTGATGATGACAACTCTCCTTCCTTTAT |
| | EDWDYAPLVLAPDD | CCAAATTCGCTCAGTTGCCAAGAAGCATCCTAAAACTTGGGTA |
| | RSYKSQYLNNGPQRI | CATTACATTGCTGCTGAAGAGGAGGACTGGGACTATGCTCCCT |
| | GRKYKKVRFMAYTD | TAGTCCTCGCCCCCGATGACAGAAGTTATAAAAGTCAATATTT |
| | ETFKTREAIQHESGIL | GAACAATGGCCCTCAGCGGATTGGTAGGAAGTACAAAAAAGT |
| | GPLLYGEVGDTLLIIF | CCGATTTATGGCATACACAGATGAAACCTTTAAGACTCGTGAA |
| | KNQASRPYNIYPHGIT | GCTATTCAGCATGAATCAGGAATCTTGGGACCTTTACTTTATG |
| | DVRPLYSRRLPKGVK | GGGAAGTTGGAGACACACTGTTGATTATATTTAAGAATCAAGC |
| | HLKDFPILPGEIFKYK | AAGCAGACCATATAACATCTACCCTCACGGAATCACTGATGTC |
| | WTVTVEDGPTKSDPR | CGTCCTTTGTATTCAAGGAGATTACCAAAAGGTGTAAAACATT |
| | CLTRYYSSFVNMERD | TGAAGGATTTTCCAATTCTGCCAGGAGAAATATTCAAATATAA |
| | LASGLIGPLLICYKES | ATGGACAGTGACTGTAGAAGATGGGCCAACTAAATCAGATCC |
| | VDQRGNQIMSDKRN | TCGGTGCCTGACCCGCTATTACTCTAGTTTCGTTAATATGGAG |
| | VILFSVFDENRSWYL | AGAGATCTAGCTTCAGGACTCATTGGCCCTCTCCTCATCTGCT |
| | TENIQRFLPNPAGVQL | ACAAAGAATCTGTAGATCAAAGAGGAAACCAGATAATGTCAG |
| | EDPEFQASNIMHSING | ACAAGAGGAATGTCATCCTGTTTTCTGTATTTGATGAGAACCG |
| | YVFDSLQLSVCLHEV | AAGCTGGTACCTCACAGAGAATATACAACGCTTTCTCCCCAAT |
| | AYWYILSIGAQTDFLS | CCAGCTGGAGTGCAGCTTGAGGATCCAGAGTTCCAAGCCTCCA |
| | VFFSGYTFKHKMVYE | ACATCATGCACAGCATCAATGGCTATGTTTTTGATAGTTTGCA |
| | DTLTLFPFSGETVFMS | GTTGTCAGTTTGTTTGCATGAGGTGGCATACTGGTACATTCTA |
| | MENPGLWILGCHNSD | AGCATTGGAGCACAGACTGACTTCCTTTCTGTCTTCTTCTCTGG |
| | FRNRGMTALLKVSSC | ATATACCTTCAAACACAAAATGGTCTATGAAGACACACTCACC |
| | DKNTGDYYEDSYEDI | CTATTCCCATTCTCAGGAGAAACTGTCTTCATGTCGATGGAAA |
| | SAYLLSKNNAIEPRSF | ACCCAGGTCTATGGATTCTGGGGTGCCACAACTCAGACTTTCG |
| | SQNPPVLKRHQREITR | GAACAGAGGCATGACCGCCTTACTGAAGGTTTCTAGTTGTGAC |
| | TTLQSDQEEIDYDDTI | AAGAACACTGGTGATTATTACGAGGACAGTTATGAAGATATTT |
| | SVEMKKEDFDIYDED | CAGCATACTTGCTGAGTAAAAACAATGCCATTGAACCAAGAA |
| | ENQSPRSFQKKTRHY | GCTTCTCTCAAAACCCACCAGTCTTGAAACGCCATCAACGGGA |
| | FIAAVERLWDYGMSS | AATAACTCGTACTACTCTTCAGTCAGATCAAGAGGAAATCGAT |
| | SPHVLRNRAQSGSVP | TATGATGATACCATATCAGTTGAAATGAAGAAGGAAGATTTTG |
| | QFKKVVFQEFTDGSF | ACATTTATGATGAGGATGAAAATCAGAGCCCCCGCAGCTTTCA |
| | TQPLYRGELNEHLGL | AAAGAAAACACGACACTATTTTATTGCTGCAGTGGAGAGGCTC |
| | LGPYIRAEVEDNIMV | TGGGATTATGGGATGAGTAGCTCCCCACATGTTCTAAGAAACA |
| | TFRNQASRPYSFYSSL | GGGCTCAGAGTGGCAGTGTCCCTCAGTTCAAGAAAGTTGTTTT |
| | ISYEEDQRQGAEPRK | CCAGGAATTTACTGATGGCTCCTTTACTCAGCCCTTATACCGTG |
| | NFVKPNETKTYFWK | GAGAACTAAATGAACATTTGGGACTCCTGGGGCCATATATAA |
| | VQHHMAPTKDEFDC | GAGCAGAAGTTGAAGATAATATCATGGTAACTTTCAGAAATC |
| | KAWAYFSDVDLEKD | AGGCCTCTCGTCCCTATTCCTTCTATTCTAGCCTTATTTCTTATG |
| | VHSGLIGPLLVCHTN | AGGAAGATCAGAGGCAAGGAGCAGAACCTAGAAAAAACTTTG |
| | TLNPAHGRQVTVQEF | TCAAGCCTAATGAAACCAAAACTTACTTTTGGAAAGTGCAACA |
| | ALFFTIFDETKSWYFT | TCATATGGCACCCACTAAAGATGAGTTTGACTGCAAAGCCTGG |
| | ENMERNCRAPCNIQM | GCTTATTTCTCTGATGTTGACCTGGAAAAAGATGTGCACTCAG |
| | EDPTFKENYRFHAIN | GCCTGATTGGACCCCTTCTGGTCTGCCACACTAACACACTGAA |
| | GYIMDTLPGLVMAQ | CCCTGCTCATGGGAGACAAGTGACAGTACAGGAATTTGCTCTG |
| | DQRIRWYLLSMGSNE | TTTTTCACCATCTTTGATGAGACCAAAAGCTGGTACTTCACTG |
| | NIHSIHFSGHVFTVRK | AAAATATGGAAAGAAACTGCAGGGCTCCCTGCAATATCCAGA |
| | KEEYKMALYNLYPG | TGGAAGATCCCACTTTTAAAGAGAATTATCGCTTCCATGCAAT |
| | VFETVEMLPSKAGIW | CAATGGCTACATAATGGATACACTACCTGGCTTAGTAATGGCT |
| | RVECLIGEHLHAGMS | CAGGATCAAAGGATTCGATGGTATCTGCTCAGCATGGGCAGC |
| | TLFLVYSNKCQTPLG | AATGAAAACATCCATTCTATTCATTTCAGTGGACATGTGTTCA |
| | MASGHIRDFQITASG | CTGTACGAAAAAAAGAGGAGTATAAAATGGCACTGTACAATC |
| | QYGQWAPKLARLHY | TCTATCCAGGTGTTTTTGAGACAGTGGAAATGTTACCATCCAA |
| | SGSINAWSTKEPFSWI | AGCTGGAATTTGGCGGGTGGAATGCCTTATTGGCGAGCATCTA |
| | KVDLLAPMIIHGIKTQ | CATGCTGGGATGAGCACACTTTTTCTGGTGTACAGCAATAAGT |
| | GARQKFSSLYISQFII | GTCAGACTCCCCTGGGAATGGCTTCTGGACACATTAGAGATTT |
| | MYSLDGKKWQTYRG | TCAGATTACAGCTTCAGGACAATATGGACAGTGGGCCCCAAA |
| | NSTGTLMVFFGNVDS | GCTGGCCAGACTTCATTATTCCGGATCAATCAATGCCTGGAGC |
| | SGIKHNIFNPPIIARYI | ACCAAGGAGCCCTTTTCTTGGATCAAGGTGGATCTGTTGGCAC |
| | RLHPTHYSIRSTLRME | CAATGATTATTCACGGCATCAAGACCCAGGGTGCCCGTCAGAA |
| | LMGCDLNSCSMPLG | GTTCTCCAGCCTCTACATCTCTCAGTTTATCATCATGTATAGTC |
| | MESKAISDAQITASSY | TTGATGGGAAGAAGTGGCAGACTTATCGAGGAAATTCCACTG |
| | FTNMFATWSPSKARL | GAACCTTAATGGTCTTCTTTGGCAATGTGGATTCATCTGGGAT |
| | HLQGRSNAWRPQVN | AAAACACAATATTTTTAACCCTCCAATTATTGCTCGATACATC |
| | NPKEWLQVDFQKTM | CGTTTGCACCCAACTCATTATAGCATTCGCAGCACTCTTCGCAT |
| | KVTGVTTQGVKSLLT | GGAGTTGATGGGCTGTGATTTAAATAGTTGCAGCATGCCATTG |
| | SMYVKEFLISSSQDG | GGAATGGAGAGTAAAGCAATATCAGATGCACAGATTACTGCT |
| | HQWTLFFQNGKVKV | TCATCCTACTTTACCAATATGTTTGCCACCTGGTCTCCTTCAAA |
| | FQGNQDSFTPVVNSL | AGCTCGACTTCACCTCCAAGGGAGGAGTAATGCCTGGAGACCT |
| | DPPLLTRYLRIHPQSW | CAGGTGAATAATCCAAAAGAGTGGCTGCAAGTGGACTTCCAG |
| | VHQIALRMEVLGCEA | AAGACAATGAAAGTCACAGGAGTAACTACTCAGGGAGTAAAA |
| | QDLYGAGSPGAETAE | TCTCTGCTTACCAGCATGTATGTGAAGGAGTTCCTCATCTCCA |
| | QKLISEEDLSPATG | GCAGTCAAGATGGCCATCAGTGGACTCTCTTTTTTCAGAATGG |
| | | CAAAGTAAAGGTTTTTCAGGGAAATCAAGACTCCTTCACACCT |
| | | GTGGTGAACTCTCTAGACCCACCGTTACTGACTCGCTACCTTC |
| | | GAATTCACCCCCAGAGTTGGGTGCACCAGATTGCCCTGAGGAT |
| | | GGAGGTTCTGGGCTGCGAGGCACAGGACCTCTACGGCGCCGG |
| | | ATCACCTGGGGCCGAAACGGCCGAACAAAAACTCATCTCAGA |
| | | AGAGGATCTGTCACCTGCAACCGGTTGA |
| pBC0168 | MQIELSTCFFLCLLRF | ATGCAAATAGAGCTCTCCACCTGCTTCTTTCTGTGCCTTTTGCG |
| | CFSATRRYYLGAVEL | ATTCTGCTTTAGTGCCACCAGAAGATACTACCTGGGTGCAGTG |
| | SWDYMQSDLGELPV | GAACTGTCATGGGACTATATGCAAAGTGATCTCGGTGAGCTGC |
| | DARFPPRVPKSFPFNT | CTGTGGACGCAAGATTTCCTCCTAGAGTGCCAAAATCTTTTCC |
| | SVVYKKTLFVEFTDH | ATTCAACACCTCAGTCGTGTACAAAAAGACTCTGTTTGTAGAA |
| | LFNIAKPRPPWMGLL | TTCACGGATCACCTTTTCAACATCGCTAAGCCAAGGCCACCCT |
| | GPTIQAEVYDTVVITL | GGATGGGTCTGCTAGGTCCTACCATCCAGGCTGAGGTTTATGA |
| | KNMASHPVSLHAVG | TACAGTGGTCATTACACTTAAGAACATGGCTTCCCATCCTGTC |
| | VSYWKASEGAEYDD | AGTCTTCATGCTGTTGGTGTATCCTACTGGAAAGCTTCTGAGG |
| | QTSQREKEDDKVFPG | GAGCTGAATATGATGATCAGACCAGTCAAAGGGAGAAAGAAG |
| | GSHTYVWQVLKENG | ATGATAAAGTCTTCCCTGGTGGAAGCCATACATATGTCTGGCA |
| | PMASDPLCLTYSYLS | GGTCCTGAAAGAGAATGGTCCAATGGCCTCTGACCCACTGTGC |
| | HVDLVKDLNSGLIGA | CTTACCTACTCATATCTTTCTCATGTGGACCTGGTAAAAGACTT |
| | LLVCREGSLAKEKGA | GAATTCAGGCCTCATTGGAGCCCTACTAGTATGTAGAGAAGGG |
| | PGSPAGSPTSTEEGTS | AGTCTGGCCAAGGAAAAGGGCGCGCCAGGTTCTCCTGCTGGCT |
| | ESATPESGPGSEPATS | CCCCCACCTCAACAGAAGAGGGGACAAGCGAAAGCGCTACGC |
| | GSETPASSTQTLHKFI | CTGAGAGTGGCCCTGGCTCTGAGCCAGCCACCTCCGGCTCTGA |
| | LLFAVFDEGKSWHSE | AACCCCTGCCTCGAGCACACAGACCTTGCACAAATTTATACTA |
| | TKNSLMQDRDAASA | CTTTTTGCTGTATTTGATGAAGGGAAAAGTTGGCACTCAGAAA |
| | RAWPKMHTVNGYVN | CAAAGAACTCCTTGATGCAGGATAGGGATGCTGCATCTGCTCG |
| | RSLPGLIGCHRKSVY | GGCCTGGCCTAAAATGCACACAGTCAATGGTTATGTAAACAG |
| | WHVIGMGTTPEVHSI | GTCTCTGCCAGGTCTGATTGGATGCCACAGGAAATCAGTCTAT |
| | FLEGHTFLVRNHRQA | TGGCATGTGATTGGAATGGGCACCACTCCTGAAGTGCACTCAA |
| | SLEISPITFLTAQTLLM | TATTCCTCGAAGGTCACACATTTCTTGTGAGGAACCATCGCCA |
| | DLGQFLLFCHISSHQH | GGCTAGCTTGGAAATCTCGCCAATAACTTTCCTTACTGCTCAA |
| | DGMEAYVKVDSCPE | ACACTCTTGATGGACCTTGGACAGTTTCTACTGTTTTGTCATAT |
| | EPQLRMKNNEEAED | CTCTTCCCACCAACATGATGGCATGGAAGCTTATGTCAAAGTA |
| | YDDDLTDSEMDVVR | GACAGCTGTCCAGAGGAACCCCAACTACGAATGAAAAATAAT |
| | FDDDNSPSFIQIRSVA | GAAGAAGCGGAAGACTATGATGATGATCTTACTGATTCTGAA |
| | KKHPKTWVHYIAAEE | ATGGATGTGGTCAGGTTTGATGATGACAACTCTCCTTCCTTTAT |
| | EDWDYAPLVLAPDD | CCAAATTCGCTCAGTTGCCAAGAAGCATCCTAAAACTTGGGTA |
| | RSYKSQYLNNGPQRI | CATTACATTGCTGCTGAAGAGGAGGACTGGGACTATGCTCCCT |
| | GRKYKKVRFMAYTD | TAGTCCTCGCCCCCGATGACAGAAGTTATAAAAGTCAATATTT |
| | ETFKTREAIQHESGIL | GAACAATGGCCCTCAGCGGATTGGTAGGAAGTACAAAAAAGT |
| | GPLLYGEVGDTLLIIF | CCGATTTATGGCATACACAGATGAAACCTTTAAGACTCGTGAA |
| | KNQASRPYNIYPHGIT | GCTATTCAGCATGAATCAGGAATCTTGGGACCTTTACTTTATG |
| | DVRPLYSRRLPKGVK | GGGAAGTTGGAGACACACTGTTGATTATATTTAAGAATCAAGC |
| | HLKDFPILPGEIFKYK | AAGCAGACCATATAACATCTACCCTCACGGAATCACTGATGTC |
| | WTVTVEDGPTKSDPR | CGTCCTTTGTATTCAAGGAGATTACCAAAAGGTGTAAAACATT |
| | CLTRYYSSFVNMERD | TGAAGGATTTTCCAATTCTGCCAGGAGAAATATTCAAATATAA |
| | LASGLIGPLLICYKES | ATGGACAGTGACTGTAGAAGATGGGCCAACTAAATCAGATCC |
| | VDQRGNQIMSDKRN | TCGGTGCCTGACCCGCTATTACTCTAGTTTCGTTAATATGGAG |
| | VILFSVFDENRSWYL | AGAGATCTAGCTTCAGGACTCATTGGCCCTCTCCTCATCTGCT |
| | TENIQRFLPNPAGVQL | ACAAAGAATCTGTAGATCAAAGAGGAAACCAGATAATGTCAG |
| | EDPEFQASNIMHSING | ACAAGAGGAATGTCATCCTGTTTTCTGTATTTGATGAGAACCG |
| | YVFDSLQLSVCLHEV | AAGCTGGTACCTCACAGAGAATATACAACGCTTTCTCCCCAAT |
| | AYWYILSIGAQTDFLS | CCAGCTGGAGTGCAGCTTGAGGATCCAGAGTTCCAAGCCTCCA |
| | VFFSGYTFKHKMVYE | ACATCATGCACAGCATCAATGGCTATGTTTTTGATAGTTTGCA |
| | DTLTLFPFSGETVFMS | GTTGTCAGTTTGTTTGCATGAGGTGGCATACTGGTACATTCTA |
| | MENPGLWILGCHNSD | AGCATTGGAGCACAGACTGACTTCCTTTCTGTCTTCTTCTCTGG |
| | FRNRGMTALLKVSSC | ATATACCTTCAAACACAAAATGGTCTATGAAGACACACTCACC |
| | DKNTGDYYEDSYEDI | CTATTCCCATTCTCAGGAGAAACTGTCTTCATGTCGATGGAAA |
| | SAYLLSKNNAIEPRSF | ACCCAGGTCTATGGATTCTGGGGTGCCACAACTCAGACTTTCG |
| | SQNPPVLKRHQREITR | GAACAGAGGCATGACCGCCTTACTGAAGGTTTCTAGTTGTGAC |
| | TTLQSDQEEIDYDDTI | AAGAACACTGGTGATTATTACGAGGACAGTTATGAAGATATTT |
| | SVEMKKEDFDIYDED | CAGCATACTTGCTGAGTAAAAACAATGCCATTGAACCAAGAA |
| | ENQSPRSFQKKTRHY | GCTTCTCTCAAAACCCACCAGTCTTGAAACGCCATCAACGGGA |
| | FIAAVERLWDYGMSS | AATAACTCGTACTACTCTTCAGTCAGATCAAGAGGAAATCGAT |
| | SPHVLRNRAQSGSVP | TATGATGATACCATATCAGTTGAAATGAAGAAGGAAGATTTTG |
| | QFKKVVFQEFTDGSF | ACATTTATGATGAGGATGAAAATCAGAGCCCCCGCAGCTTTCA |
| | TQPLYRGELNEHLGL | AAAGAAAACACGACACTATTTTATTGCTGCAGTGGAGAGGCTC |
| | LGPYIRAEVEDNIMV | TGGGATTATGGGATGAGTAGCTCCCCACATGTTCTAAGAAACA |
| | TFRNQASRPYSFYSSL | GGGCTCAGAGTGGCAGTGTCCCTCAGTTCAAGAAAGTTGTTTT |
| | ISYEEDQRQGAEPRK | CCAGGAATTTACTGATGGCTCCTTTACTCAGCCCTTATACCGTG |
| | NFVKPNETKTYFWK | GAGAACTAAATGAACATTTGGGACTCCTGGGGCCATATATAA |
| | VQHHMAPTKDEFDC | GAGCAGAAGTTGAAGATAATATCATGGTAACTTTCAGAAATC |
| | KAWAYFSDVDLEKD | AGGCCTCTCGTCCCTATTCCTTCTATTCTAGCCTTATTTCTTATG |
| | VHSGLIGPLLVCHTN | AGGAAGATCAGAGGCAAGGAGCAGAACCTAGAAAAAACTTTG |
| | TLNPAHGRQVTVQEF | TCAAGCCTAATGAAACCAAAACTTACTTTTGGAAAGTGCAACA |
| | ALFFTIFDETKSWYFT | TCATATGGCACCCACTAAAGATGAGTTTGACTGCAAAGCCTGG |
| | ENMERNCRAPCNIQM | GCTTATTTCTCTGATGTTGACCTGGAAAAAGATGTGCACTCAG |
| | EDPTFKENYRFHAIN | GCCTGATTGGACCCCTTCTGGTCTGCCACACTAACACACTGAA |
| | GYIMDTLPGLVMAQ | CCCTGCTCATGGGAGACAAGTGACAGTACAGGAATTTGCTCTG |
| | DQRIRWYLLSMGSNE | TTTTTCACCATCTTTGATGAGACCAAAAGCTGGTACTTCACTG |
| | NIHSIHFSGHVFTVRK | AAAATATGGAAAGAAACTGCAGGGCTCCCTGCAATATCCAGA |
| | KEEYKMALYNLYPG | TGGAAGATCCCACTTTTAAAGAGAATTATCGCTTCCATGCAAT |
| | VFETVEMLPSKAGIW | CAATGGCTACATAATGGATACACTACCTGGCTTAGTAATGGCT |
| | RVECLIGEHLHAGMS | CAGGATCAAAGGATTCGATGGTATCTGCTCAGCATGGGCAGC |
| | TLFLVYSNKCQTPLG | AATGAAAACATCCATTCTATTCATTTCAGTGGACATGTGTTCA |
| | MASGHIRDFQITASG | CTGTACGAAAAAAAGAGGAGTATAAAATGGCACTGTACAATC |
| | QYGQWAPKLARLHY | TCTATCCAGGTGTTTTTGAGACAGTGGAAATGTTACCATCCAA |
| | SGSINAWSTKEPFSWI | AGCTGGAATTTGGCGGGTGGAATGCCTTATTGGCGAGCATCTA |
| | KVDLLAPMIIHGIKTQ | CATGCTGGGATGAGCACACTTTTTCTGGTGTACAGCAATAAGT |
| | GARQKFSSLYISQFII | GTCAGACTCCCCTGGGAATGGCTTCTGGACACATTAGAGATTT |
| | MYSLDGKKWQTYRG | TCAGATTACAGCTTCAGGACAATATGGACAGTGGGCCCCAAA |
| | NSTGTLMVFFGNVDS | GCTGGCCAGACTTCATTATTCCGGATCAATCAATGCCTGGAGC |
| | SGIKHNIFNPPIIARYI | ACCAAGGAGCCCTTTTCTTGGATCAAGGTGGATCTGTTGGCAC |
| | RLHPTHYSIRSTLRME | CAATGATTATTCACGGCATCAAGACCCAGGGTGCCCGTCAGAA |
| | LMGCDLNSCSMPLG | GTTCTCCAGCCTCTACATCTCTCAGTTTATCATCATGTATAGTC |
| | MESKAISDAQITASSY | TTGATGGGAAGAAGTGGCAGACTTATCGAGGAAATTCCACTG |
| | FTNMFATWSPSKARL | GAACCTTAATGGTCTTCTTTGGCAATGTGGATTCATCTGGGAT |
| | HLQGRSNAWRPQVN | AAAACACAATATTTTTAACCCTCCAATTATTGCTCGATACATC |
| | NPKEWLQVDFQKTM | CGTTTGCACCCAACTCATTATAGCATTCGCAGCACTCTTCGCAT |
| | KVTGVTTQGVKSLLT | GGAGTTGATGGGCTGTGATTTAAATAGTTGCAGCATGCCATTG |
| | SMYVKEFLISSSQDG | GGAATGGAGAGTAAAGCAATATCAGATGCACAGATTACTGCT |
| | HQWTLFFQNGKVKV | TCATCCTACTTTACCAATATGTTTGCCACCTGGTCTCCTTCAAA |
| | FQGNQDSFTPVVNSL | AGCTCGACTTCACCTCCAAGGGAGGAGTAATGCCTGGAGACCT |
| | DPPLLTRYLRIHPQSW | CAGGTGAATAATCCAAAAGAGTGGCTGCAAGTGGACTTCCAG |
| | VHQIALRMEVLGCEA | AAGACAATGAAAGTCACAGGAGTAACTACTCAGGGAGTAAAA |
| | QDLYGAGSPGAETAE | TCTCTGCTTACCAGCATGTATGTGAAGGAGTTCCTCATCTCCA |
| | QKLISEEDLSPATG | GCAGTCAAGATGGCCATCAGTGGACTCTCTTTTTTCAGAATGG |
| | | CAAAGTAAAGGTTTTTCAGGGAAATCAAGACTCCTTCACACCT |
| | | GTGGTGAACTCTCTAGACCCACCGTTACTGACTCGCTACCTTC |
| | | GAATTCACCCCCAGAGTTGGGTGCACCAGATTGCCCTGAGGAT |
| | | GGAGGTTCTGGGCTGCGAGGCACAGGACCTCTACGGCGCCGG |
| | | ATCACCTGGGGCCGAAACGGCCGAACAAAAACTCATCTCAGA |
| | | AGAGGATCTGTCACCTGCAACCGGTTGA |
| pBC0129 | MQIELSTCFFLCLLRF | ATGCAAATAGAGCTCTCCACCTGCTTCTTTCTGTGCCTTTTGCG |
| | CFSATRRYYLGAVEL | ATTCTGCTTTAGTGCCACCAGAAGATACTACCTGGGTGCAGTG |
| | SWDYMQSDLGELPV | GAACTGTCATGGGACTATATGCAAAGTGATCTCGGTGAGCTGC |
| | DARFPPRVPKSFPFNT | CTGTGGACGCAAGATTTCCTCCTAGAGTGCCAAAATCTTTTCC |
| | SVVYKKTLFVEFTDH | ATTCAACACCTCAGTCGTGTACAAAAAGACTCTGTTTGTAGAA |
| | LFNIAKPRPPWMGLL | TTCACGGATCACCTTTTCAACATCGCTAAGCCAAGGCCACCCT |
| | GPTIQAEVYDTVVITL | GGATGGGTCTGCTAGGTCCTACCATCCAGGCTGAGGTTTATGA |
| | KNMASHPVSLHAVG | TACAGTGGTCATTACACTTAAGAACATGGCTTCCCATCCTGTC |
| | VSYWKASEGAEYDD | AGTCTTCATGCTGTTGGTGTATCCTACTGGAAAGCTTCTGAGG |
| | QTSQREKEDDKVFPG | GAGCTGAATATGATGATCAGACCAGTCAAAGGGAGAAAGAAG |
| | GSHTYVWQVLKENG | ATGATAAAGTCTTCCCTGGTGGAAGCCATACATATGTCTGGCA |
| | PMASDPLCLTYSYLS | GGTCCTGAAAGAGAATGGTCCAATGGCCTCTGACCCACTGTGC |
| | HVDLVKDLNSGLIGA | CTTACCTACTCATATCTTTCTCATGTGGACCTGGTAAAAGACTT |
| | LLVCREGSLAKEKTQ | GAATTCAGGCCTCATTGGAGCCCTACTAGTATGTAGAGAAGGG |
| | TLHKFILLFAVFDEGK | AGTCTGGCCAAGGAAAAGACACAGACCTTGCACAAATTTATA |
| | SWHSETKNSLGAPGS | CTACTTTTTGCTGTATTTGATGAAGGGAAAAGTTGGCACTCAG |
| | PAGSPTSTEEGTSESA | AAACAAAGAACTCCTTGGGCGCGCCAGGTTCTCCTGCTGGCTC |
| | TPESGPGSEPATSGSE | CCCCACCTCAACAGAAGAGGGGACAAGCGAAAGCGCTACGCC |
| | TPASSMQDRDAASAR | TGAGAGTGGCCCTGGCTCTGAGCCAGCCACCTCCGGCTCTGAA |
| | AWPKMHTVNGYVNR | ACCCCTGCCTCGAGCATGCAGGATAGGGATGCTGCATCTGCTC |
| | SLPGLIGCHRKSVYW | GGGCCTGGCCTAAAATGCACACAGTCAATGGTTATGTAAACA |
| | HVIGMGTTPEVHSIFL | GGTCTCTGCCAGGTCTGATTGGATGCCACAGGAAATCAGTCTA |
| | EGHTFLVRNHRQASL | TTGGCATGTGATTGGAATGGGCACCACTCCTGAAGTGCACTCA |
| | EISPITFLTAQTLLMD | ATATTCCTCGAAGGTCACACATTTCTTGTGAGGAACCATCGCC |
| | LGQFLLFCHISSHQHD | AGGCTAGCTTGGAAATCTCGCCAATAACTTTCCTTACTGCTCA |
| | GMEAYVKVDSCPEEP | AACACTCTTGATGGACCTTGGACAGTTTCTACTGTTTTGTCATA |
| | QLRMKNNEEAEDYD | TCTCTTCCCACCAACATGATGGCATGGAAGCTTATGTCAAAGT |
| | DDLTDSEMDVVRFD | AGACAGCTGTCCAGAGGAACCCCAACTACGAATGAAAAATAA |
| | DDNSPSFIQIRSVAKK | TGAAGAAGCGGAAGACTATGATGATGATCTTACTGATTCTGAA |
| | HPKTWVHYIAAEEED | ATGGATGTGGTCAGGTTTGATGATGACAACTCTCCTTCCTTTAT |
| | WDYAPLVLAPDDRS | CCAAATTCGCTCAGTTGCCAAGAAGCATCCTAAAACTTGGGTA |
| | YKSQYLNNGPQRIGR | CATTACATTGCTGCTGAAGAGGAGGACTGGGACTATGCTCCCT |
| | KYKKVRFMAYTDET | TAGTCCTCGCCCCCGATGACAGAAGTTATAAAAGTCAATATTT |
| | FKTREAIQHESGILGP | GAACAATGGCCCTCAGCGGATTGGTAGGAAGTACAAAAAAGT |
| | LLYGEVGDTLLIIFKN | CCGATTTATGGCATACACAGATGAAACCTTTAAGACTCGTGAA |
| | QASRPYNIYPHGITDV | GCTATTCAGCATGAATCAGGAATCTTGGGACCTTTACTTTATG |
| | RPLYSRRLPKGVKHL | GGGAAGTTGGAGACACACTGTTGATTATATTTAAGAATCAAGC |
| | KDFPILPGEIFKYKWT | AAGCAGACCATATAACATCTACCCTCACGGAATCACTGATGTC |
| | VTVEDGPTKSDPRCL | CGTCCTTTGTATTCAAGGAGATTACCAAAAGGTGTAAAACATT |
| | TRYYSSFVNMERDLA | TGAAGGATTTTCCAATTCTGCCAGGAGAAATATTCAAATATAA |
| | SGLIGPLLICYKESVD | ATGGACAGTGACTGTAGAAGATGGGCCAACTAAATCAGATCC |
| | QRGNQIMSDKRNVIL | TCGGTGCCTGACCCGCTATTACTCTAGTTTCGTTAATATGGAG |
| | FSVFDENRSWYLTEN | AGAGATCTAGCTTCAGGACTCATTGGCCCTCTCCTCATCTGCT |
| | IQRFLPNPAGVQLEDP | ACAAAGAATCTGTAGATCAAAGAGGAAACCAGATAATGTCAG |
| | EFQASNIMHSINGYVF | ACAAGAGGAATGTCATCCTGTTTTCTGTATTTGATGAGAACCG |
| | DSLQLSVCLHEVAY | AAGCTGGTACCTCACAGAGAATATACAACGCTTTCTCCCCAAT |
| | WYILSIGAQTDFLSVF | CCAGCTGGAGTGCAGCTTGAGGATCCAGAGTTCCAAGCCTCCA |
| | FSGYTFKHKMVYEDT | ACATCATGCACAGCATCAATGGCTATGTTTTTGATAGTTTGCA |
| | LTLFPFSGETVFMSM | GTTGTCAGTTTGTTTGCATGAGGTGGCATACTGGTACATTCTA |
| | ENPGLWILGCHNSDF | AGCATTGGAGCACAGACTGACTTCCTTTCTGTCTTCTTCTCTGG |
| | RNRGMTALLKVSSCD | ATATACCTTCAAACACAAAATGGTCTATGAAGACACACTCACC |
| | KNTGDYYEDSYEDIS | CTATTCCCATTCTCAGGAGAAACTGTCTTCATGTCGATGGAAA |
| | AYLLSKNNAIEPRSFS | ACCCAGGTCTATGGATTCTGGGGTGCCACAACTCAGACTTTCG |
| | QNPPVLKRHQREITR | GAACAGAGGCATGACCGCCTTACTGAAGGTTTCTAGTTGTGAC |
| | TTLQSDQEEIDYDDTI | AAGAACACTGGTGATTATTACGAGGACAGTTATGAAGATATTT |
| | SVEMKKEDFDIYDED | CAGCATACTTGCTGAGTAAAAACAATGCCATTGAACCAAGAA |
| | ENQSPRSFQKKTRHY | GCTTCTCTCAAAACCCACCAGTCTTGAAACGCCATCAACGGGA |
| | FIAAVERLWDYGMSS | AATAACTCGTACTACTCTTCAGTCAGATCAAGAGGAAATCGAT |
| | SPHVLRNRAQSGSVP | TATGATGATACCATATCAGTTGAAATGAAGAAGGAAGATTTTG |
| | QFKKVVFQEFTDGSF | ACATTTATGATGAGGATGAAAATCAGAGCCCCCGCAGCTTTCA |
| | TQPLYRGELNEHLGL | AAAGAAAACACGACACTATTTTATTGCTGCAGTGGAGAGGCTC |
| | LGPYIRAEVEDNIMV | TGGGATTATGGGATGAGTAGCTCCCCACATGTTCTAAGAAACA |
| | TFRNQASRPYSFYSSL | GGGCTCAGAGTGGCAGTGTCCCTCAGTTCAAGAAAGTTGTTTT |
| | ISYEEDQRQGAEPRK | CCAGGAATTTACTGATGGCTCCTTTACTCAGCCCTTATACCGTG |
| | NFVKPNETKTYFWK | GAGAACTAAATGAACATTTGGGACTCCTGGGGCCATATATAA |
| | VQHHMAPTKDEFDC | GAGCAGAAGTTGAAGATAATATCATGGTAACTTTCAGAAATC |
| | KAWAYFSDVDLEKD | AGGCCTCTCGTCCCTATTCCTTCTATTCTAGCCTTATTTCTTATG |
| | VHSGLIGPLLVCHTN | AGGAAGATCAGAGGCAAGGAGCAGAACCTAGAAAAAACTTTG |
| | TLNPAHGRQVTVQEF | TCAAGCCTAATGAAACCAAAACTTACTTTTGGAAAGTGCAACA |
| | ALFFTIFDETKSWYFT | TCATATGGCACCCACTAAAGATGAGTTTGACTGCAAAGCCTGG |
| | ENMERNCRAPCNIQM | GCTTATTTCTCTGATGTTGACCTGGAAAAAGATGTGCACTCAG |
| | EDPTFKENYRFHAIN | GCCTGATTGGACCCCTTCTGGTCTGCCACACTAACACACTGAA |
| | GYIMDTLPGLVMAQ | CCCTGCTCATGGGAGACAAGTGACAGTACAGGAATTTGCTCTG |
| | DQRIRWYLLSMGSNE | TTTTTCACCATCTTTGATGAGACCAAAAGCTGGTACTTCACTG |
| | NIHSIHFSGHVFTVRK | AAAATATGGAAAGAAACTGCAGGGCTCCCTGCAATATCCAGA |
| | KEEYKMALYNLYPG | TGGAAGATCCCACTTTTAAAGAGAATTATCGCTTCCATGCAAT |
| | VFETVEMLPSKAGIW | CAATGGCTACATAATGGATACACTACCTGGCTTAGTAATGGCT |
| | RVECLIGEHLHAGMS | CAGGATCAAAGGATTCGATGGTATCTGCTCAGCATGGGCAGC |
| | TLFLVYSNKCQTPLG | AATGAAAACATCCATTCTATTCATTTCAGTGGACATGTGTTCA |
| | MASGHIRDFQITASG | CTGTACGAAAAAAAGAGGAGTATAAAATGGCACTGTACAATC |
| | QYGQWAPKLARLHY | TCTATCCAGGTGTTTTTGAGACAGTGGAAATGTTACCATCCAA |
| | SGSINAWSTKEPFSWI | AGCTGGAATTTGGCGGGTGGAATGCCTTATTGGCGAGCATCTA |
| | KVDLLAPMIIHGIKTQ | CATGCTGGGATGAGCACACTTTTTCTGGTGTACAGCAATAAGT |
| | GARQKFSSLYISQFII | GTCAGACTCCCCTGGGAATGGCTTCTGGACACATTAGAGATTT |
| | MYSLDGKKWQTYRG | TCAGATTACAGCTTCAGGACAATATGGACAGTGGGCCCCAAA |
| | NSTGTLMVFFGNVDS | GCTGGCCAGACTTCATTATTCCGGATCAATCAATGCCTGGAGC |
| | SGIKHNIFNPPIIARYI | ACCAAGGAGCCCTTTTCTTGGATCAAGGTGGATCTGTTGGCAC |
| | RLHPTHYSIRSTLRME | CAATGATTATTCACGGCATCAAGACCCAGGGTGCCCGTCAGAA |
| | LMGCDLNSCSMPLG | GTTCTCCAGCCTCTACATCTCTCAGTTTATCATCATGTATAGTC |
| | MESKAISDAQITASSY | TTGATGGGAAGAAGTGGCAGACTTATCGAGGAAATTCCACTG |
| | FTNMFATWSPSKARL | GAACCTTAATGGTCTTCTTTGGCAATGTGGATTCATCTGGGAT |
| | HLQGRSNAWRPQVN | AAAACACAATATTTTTAACCCTCCAATTATTGCTCGATACATC |
| | NPKEWLQVDFQKTM | CGTTTGCACCCAACTCATTATAGCATTCGCAGCACTCTTCGCAT |
| | KVTGVTTQGVKSLLT | GGAGTTGATGGGCTGTGATTTAAATAGTTGCAGCATGCCATTG |
| | SMYVKEFLISSSQDG | GGAATGGAGAGTAAAGCAATATCAGATGCACAGATTACTGCT |
| | HQWTLFFQNGKVKV | TCATCCTACTTTACCAATATGTTTGCCACCTGGTCTCCTTCAAA |
| | FQGNQDSFTPVVNSL | AGCTCGACTTCACCTCCAAGGGAGGAGTAATGCCTGGAGACCT |
| | DPPLLTRYLRIHPQSW | CAGGTGAATAATCCAAAAGAGTGGCTGCAAGTGGACTTCCAG |
| | VHQIALRMEVLGCEA | AAGACAATGAAAGTCACAGGAGTAACTACTCAGGGAGTAAAA |
| | QDLYGAGSPGAETAE | TCTCTGCTTACCAGCATGTATGTGAAGGAGTTCCTCATCTCCA |
| | QKLISEEDLSPATG | GCAGTCAAGATGGCCATCAGTGGACTCTCTTTTTTCAGAATGG |
| | | CAAAGTAAAGGTTTTTCAGGGAAATCAAGACTCCTTCACACCT |
| | | GTGGTGAACTCTCTAGACCCACCGTTACTGACTCGCTACCTTC |
| | | GAATTCACCCCCAGAGTTGGGTGCACCAGATTGCCCTGAGGAT |
| | | GGAGGTTCTGGGCTGCGAGGCACAGGACCTCTACGGCGCCGG |
| | | ATCACCTGGGGCCGAAACGGCCGAACAAAAACTCATCTCAGA |
| | | AGAGGATCTGTCACCTGCAACCGGTTGA |
| pBC0169 | MQIELSTCFFLCLLRF | ATGCAAATAGAGCTCTCCACCTGCTTCTTTCTGTGCCTTTTGCG |
| | CFSATRRYYLGAVEL | ATTCTGCTTTAGTGCCACCAGAAGATACTACCTGGGTGCAGTG |
| | SWDYMQSDLGELPV | GAACTGTCATGGGACTATATGCAAAGTGATCTCGGTGAGCTGC |
| | DARFPPRVPKSFPFNT | CTGTGGACGCAAGATTTCCTCCTAGAGTGCCAAAATCTTTTCC |
| | SVVYKKTLFVEFTDH | ATTCAACACCTCAGTCGTGTACAAAAAGACTCTGTTTGTAGAA |
| | LFNIAKPRPPWMGLL | TTCACGGATCACCTTTTCAACATCGCTAAGCCAAGGCCACCCT |
| | GPTIQAEVYDTVVITL | GGATGGGTCTGCTAGGTCCTACCATCCAGGCTGAGGTTTATGA |
| | KNMASHPVSLHAVG | TACAGTGGTCATTACACTTAAGAACATGGCTTCCCATCCTGTC |
| | VSYWKASEGAEYDD | AGTCTTCATGCTGTTGGTGTATCCTACTGGAAAGCTTCTGAGG |
| | QTSQREKEDDKVFPG | GAGCTGAATATGATGATCAGACCAGTCAAAGGGAGAAAGAAG |
| | GSHTYVWQVLKENG | ATGATAAAGTCTTCCCTGGTGGAAGCCATACATATGTCTGGCA |
| | PMASDPLCLTYSYLS | GGTCCTGAAAGAGAATGGTCCAATGGCCTCTGACCCACTGTGC |
| | HVDLVKDLNSGLIGA | CTTACCTACTCATATCTTTCTCATGTGGACCTGGTAAAAGACTT |
| | LLVCREGSLAKEKTQ | GAATTCAGGCCTCATTGGAGCCCTACTAGTATGTAGAGAAGGG |
| | TLHKFILLFAVFDEGK | AGTCTGGCCAAGGAAAAGACACAGACCTTGCACAAATTTATA |
| | SWHSETKNSLMQDR | CTACTTTTTGCTGTATTTGATGAAGGGAAAAGTTGGCACTCAG |
| | DAASARAWPKGAPG | AAACAAAGAACTCCTTGATGCAGGATAGGGATGCTGCATCTG |
| | SPAGSPTSTEEGTSES | CTCGGGCCTGGCCTAAAGGCGCGCCAGGTTCTCCTGCTGGCTC |
| | ATPESGPGSEPATSGS | CCCCACCTCAACAGAAGAGGGGACAAGCGAAAGCGCTACGCC |
| | ETPASSMHTVNGYVN | TGAGAGTGGCCCTGGCTCTGAGCCAGCCACCTCCGGCTCTGAA |
| | RSLPGLIGCHRKSVY | ACCCCTGCCTCGAGCATGCACACAGTCAATGGTTATGTAAACA |
| | WHVIGMGTTPEVHSI | GGTCTCTGCCAGGTCTGATTGGATGCCACAGGAAATCAGTCTA |
| | FLEGHTFLVRNHRQA | TTGGCATGTGATTGGAATGGGCACCACTCCTGAAGTGCACTCA |
| | SLEISPITFLTAQTLLM | ATATTCCTCGAAGGTCACACATTTCTTGTGAGGAACCATCGCC |
| | DLGQFLLFCHISSHQH | AGGCTAGCTTGGAAATCTCGCCAATAACTTTCCTTACTGCTCA |
| | DGMEAYVKVDSCPE | AACACTCTTGATGGACCTTGGACAGTTTCTACTGTTTTGTCATA |
| | EPQLRMKNNEEAED | TCTCTTCCCACCAACATGATGGCATGGAAGCTTATGTCAAAGT |
| | YDDDLTDSEMDVVR | AGACAGCTGTCCAGAGGAACCCCAACTACGAATGAAAAATAA |
| | FDDDNSPSFIQIRSVA | TGAAGAAGCGGAAGACTATGATGATGATCTTACTGATTCTGAA |
| | KKHPKTWVHYIAAEE | ATGGATGTGGTCAGGTTTGATGATGACAACTCTCCTTCCTTTAT |
| | EDWDYAPLVLAPDD | CCAAATTCGCTCAGTTGCCAAGAAGCATCCTAAAACTTGGGTA |
| | RSYKSQYLNNGPQRI | CATTACATTGCTGCTGAAGAGGAGGACTGGGACTATGCTCCCT |
| | GRKYKKVRFMAYTD | TAGTCCTCGCCCCCGATGACAGAAGTTATAAAAGTCAATATTT |
| | ETFKTREAIQHESGIL | GAACAATGGCCCTCAGCGGATTGGTAGGAAGTACAAAAAAGT |
| | GPLLYGEVGDTLLIIF | CCGATTTATGGCATACACAGATGAAACCTTTAAGACTCGTGAA |
| | KNQASRPYNIYPHGIT | GCTATTCAGCATGAATCAGGAATCTTGGGACCTTTACTTTATG |
| | DVRPLYSRRLPKGVK | GGGAAGTTGGAGACACACTGTTGATTATATTTAAGAATCAAGC |
| | HLKDFPILPGEIFKYK | AAGCAGACCATATAACATCTACCCTCACGGAATCACTGATGTC |
| | WTVTVEDGPTKSDPR | CGTCCTTTGTATTCAAGGAGATTACCAAAAGGTGTAAAACATT |
| | CLTRYYSSFVNMERD | TGAAGGATTTTCCAATTCTGCCAGGAGAAATATTCAAATATAA |
| | LASGLIGPLLICYKES | ATGGACAGTGACTGTAGAAGATGGGCCAACTAAATCAGATCC |
| | VDQRGNQIMSDKRN | TCGGTGCCTGACCCGCTATTACTCTAGTTTCGTTAATATGGAG |
| | VILFSVFDENRSWYL | AGAGATCTAGCTTCAGGACTCATTGGCCCTCTCCTCATCTGCT |
| | TENIQRFLPNPAGVQL | ACAAAGAATCTGTAGATCAAAGAGGAAACCAGATAATGTCAG |
| | EDPEFQASNIMHSING | ACAAGAGGAATGTCATCCTGTTTTCTGTATTTGATGAGAACCG |
| | YVFDSLQLSVCLHEV | AAGCTGGTACCTCACAGAGAATATACAACGCTTTCTCCCCAAT |
| | AYWYILSIGAQTDFLS | CCAGCTGGAGTGCAGCTTGAGGATCCAGAGTTCCAAGCCTCCA |
| | VFFSGYTFKHKMVYE | ACATCATGCACAGCATCAATGGCTATGTTTTTGATAGTTTGCA |
| | DTLTLFPFSGETVFMS | GTTGTCAGTTTGTTTGCATGAGGTGGCATACTGGTACATTCTA |
| | MENPGLWILGCHNSD | AGCATTGGAGCACAGACTGACTTCCTTTCTGTCTTCTTCTCTGG |
| | FRNRGMTALLKVSSC | ATATACCTTCAAACACAAAATGGTCTATGAAGACACACTCACC |
| | DKNTGDYYEDSYEDI | CTATTCCCATTCTCAGGAGAAACTGTCTTCATGTCGATGGAAA |
| | SAYLLSKNNAIEPRSF | ACCCAGGTCTATGGATTCTGGGGTGCCACAACTCAGACTTTCG |
| | SQNPPVLKRHQREITR | GAACAGAGGCATGACCGCCTTACTGAAGGTTTCTAGTTGTGAC |
| | TTLQSDQEEIDYDDTI | AAGAACACTGGTGATTATTACGAGGACAGTTATGAAGATATTT |
| | SVEMKKEDFDIYDED | CAGCATACTTGCTGAGTAAAAACAATGCCATTGAACCAAGAA |
| | ENQSPRSFQKKTRHY | GCTTCTCTCAAAACCCACCAGTCTTGAAACGCCATCAACGGGA |
| | FIAAVERLWDYGMSS | AATAACTCGTACTACTCTTCAGTCAGATCAAGAGGAAATCGAT |
| | SPHVLRNRAQSGSVP | TATGATGATACCATATCAGTTGAAATGAAGAAGGAAGATTTTG |
| | QFKKVVFQEFTDGSF | ACATTTATGATGAGGATGAAAATCAGAGCCCCCGCAGCTTTCA |
| | TQPLYRGELNEHLGL | AAAGAAAACACGACACTATTTTATTGCTGCAGTGGAGAGGCTC |
| | LGPYIRAEVEDNIMV | TGGGATTATGGGATGAGTAGCTCCCCACATGTTCTAAGAAACA |
| | TFRNQASRPYSFYSSL | GGGCTCAGAGTGGCAGTGTCCCTCAGTTCAAGAAAGTTGTTTT |
| | ISYEEDQRQGAEPRK | CCAGGAATTTACTGATGGCTCCTTTACTCAGCCCTTATACCGTG |
| | NFVKPNETKTYFWK | GAGAACTAAATGAACATTTGGGACTCCTGGGGCCATATATAA |
| | VQHHMAPTKDEFDC | GAGCAGAAGTTGAAGATAATATCATGGTAACTTTCAGAAATC |
| | KAWAYFSDVDLEKD | AGGCCTCTCGTCCCTATTCCTTCTATTCTAGCCTTATTTCTTATG |
| | VHSGLIGPLLVCHTN | AGGAAGATCAGAGGCAAGGAGCAGAACCTAGAAAAAACTTTG |
| | TLNPAHGRQVTVQEF | TCAAGCCTAATGAAACCAAAACTTACTTTTGGAAAGTGCAACA |
| | ALFFTIFDETKSWYFT | TCATATGGCACCCACTAAAGATGAGTTTGACTGCAAAGCCTGG |
| | ENMERNCRAPCNIQM | GCTTATTTCTCTGATGTTGACCTGGAAAAAGATGTGCACTCAG |
| | EDPTFKENYRFHAIN | GCCTGATTGGACCCCTTCTGGTCTGCCACACTAACACACTGAA |
| | GYIMDTLPGLVMAQ | CCCTGCTCATGGGAGACAAGTGACAGTACAGGAATTTGCTCTG |
| | DQRIRWYLLSMGSNE | TTTTTCACCATCTTTGATGAGACCAAAAGCTGGTACTTCACTG |
| | NIHSIHFSGHVFTVRK | AAAATATGGAAAGAAACTGCAGGGCTCCCTGCAATATCCAGA |
| | KEEYKMALYNLYPG | TGGAAGATCCCACTTTTAAAGAGAATTATCGCTTCCATGCAAT |
| | VFETVEMLPSKAGIW | CAATGGCTACATAATGGATACACTACCTGGCTTAGTAATGGCT |
| | RVECLIGEHLHAGMS | CAGGATCAAAGGATTCGATGGTATCTGCTCAGCATGGGCAGC |
| | TLFLVYSNKCQTPLG | AATGAAAACATCCATTCTATTCATTTCAGTGGACATGTGTTCA |
| | MASGHIRDFQITASG | CTGTACGAAAAAAAGAGGAGTATAAAATGGCACTGTACAATC |
| | QYGQWAPKLARLHY | TCTATCCAGGTGTTTTTGAGACAGTGGAAATGTTACCATCCAA |
| | SGSINAWSTKEPFSWI | AGCTGGAATTTGGCGGGTGGAATGCCTTATTGGCGAGCATCTA |
| | KVDLLAPMIIHGIKTQ | CATGCTGGGATGAGCACACTTTTTCTGGTGTACAGCAATAAGT |
| | GARQKFSSLYISQFII | GTCAGACTCCCCTGGGAATGGCTTCTGGACACATTAGAGATTT |
| | MYSLDGKKWQTYRG | TCAGATTACAGCTTCAGGACAATATGGACAGTGGGCCCCAAA |
| | NSTGTLMVFFGNVDS | GCTGGCCAGACTTCATTATTCCGGATCAATCAATGCCTGGAGC |
| | SGIKHNIFNPPIIARYI | ACCAAGGAGCCCTTTTCTTGGATCAAGGTGGATCTGTTGGCAC |
| | RLHPTHYSIRSTLRME | CAATGATTATTCACGGCATCAAGACCCAGGGTGCCCGTCAGAA |
| | LMGCDLNSCSMPLG | GTTCTCCAGCCTCTACATCTCTCAGTTTATCATCATGTATAGTC |
| | MESKAISDAQITASSY | TTGATGGGAAGAAGTGGCAGACTTATCGAGGAAATTCCACTG |
| | FTNMFATWSPSKARL | GAACCTTAATGGTCTTCTTTGGCAATGTGGATTCATCTGGGAT |
| | HLQGRSNAWRPQVN | AAAACACAATATTTTTAACCCTCCAATTATTGCTCGATACATC |
| | NPKEWLQVDFQKTM | CGTTTGCACCCAACTCATTATAGCATTCGCAGCACTCTTCGCAT |
| | KVTGVTTQGVKSLLT | GGAGTTGATGGGCTGTGATTTAAATAGTTGCAGCATGCCATTG |
| | SMYVKEFLISSSQDG | GGAATGGAGAGTAAAGCAATATCAGATGCACAGATTACTGCT |
| | HQWTLFFQNGKVKV | TCATCCTACTTTACCAATATGTTTGCCACCTGGTCTCCTTCAAA |
| | FQGNQDSFTPVVNSL | AGCTCGACTTCACCTCCAAGGGAGGAGTAATGCCTGGAGACCT |
| | DPPLLTRYLRIHPQSW | CAGGTGAATAATCCAAAAGAGTGGCTGCAAGTGGACTTCCAG |
| | VHQIALRMEVLGCEA | AAGACAATGAAAGTCACAGGAGTAACTACTCAGGGAGTAAAA |
| | QDLYGAGSPGAETAE | TCTCTGCTTACCAGCATGTATGTGAAGGAGTTCCTCATCTCCA |
| | QKLISEEDLSPATG | GCAGTCAAGATGGCCATCAGTGGACTCTCTTTTTTCAGAATGG |
| | | CAAAGTAAAGGTTTTTCAGGGAAATCAAGACTCCTTCACACCT |
| | | GTGGTGAACTCTCTAGACCCACCGTTACTGACTCGCTACCTTC |
| | | GAATTCACCCCCAGAGTTGGGTGCACCAGATTGCCCTGAGGAT |
| | | GGAGGTTCTGGGCTGCGAGGCACAGGACCTCTACGGCGCCGG |
| | | ATCACCTGGGGCCGAAACGGCCGAACAAAAACTCATCTCAGA |
| | | AGAGGATCTGTCACCTGCAACCGGTTGA |
| pBC0130 | MQIELSTCFFLCLLRF | ATGCAAATAGAGCTCTCCACCTGCTTCTTTCTGTGCCTTTTGCG |
| | CFSATRRYYLGAVEL | ATTCTGCTTTAGTGCCACCAGAAGATACTACCTGGGTGCAGTG |
| | SWDYMQSDLGELPV | GAACTGTCATGGGACTATATGCAAAGTGATCTCGGTGAGCTGC |
| | DARFPPRVPKSFPFNT | CTGTGGACGCAAGATTTCCTCCTAGAGTGCCAAAATCTTTTCC |
| | SVVYKKTLFVEFTDH | ATTCAACACCTCAGTCGTGTACAAAAAGACTCTGTTTGTAGAA |
| | LFNIAKPRPPWMGLL | TTCACGGATCACCTTTTCAACATCGCTAAGCCAAGGCCACCCT |
| | GPTIQAEVYDTVVITL | GGATGGGTCTGCTAGGTCCTACCATCCAGGCTGAGGTTTATGA |
| | KNMASHPVSLHAVG | TACAGTGGTCATTACACTTAAGAACATGGCTTCCCATCCTGTC |
| | VSYWKASEGAEYDD | AGTCTTCATGCTGTTGGTGTATCCTACTGGAAAGCTTCTGAGG |
| | QTSQREKEDDKVFPG | GAGCTGAATATGATGATCAGACCAGTCAAAGGGAGAAAGAAG |
| | GSHTYVWQVLKENG | ATGATAAAGTCTTCCCTGGTGGAAGCCATACATATGTCTGGCA |
| | PMASDPLCLTYSYLS | GGTCCTGAAAGAGAATGGTCCAATGGCCTCTGACCCACTGTGC |
| | HVDLVKDLNSGLIGA | CTTACCTACTCATATCTTTCTCATGTGGACCTGGTAAAAGACTT |
| | LLVCREGSLAKEKTQ | GAATTCAGGCCTCATTGGAGCCCTACTAGTATGTAGAGAAGGG |
| | TLHKFILLFAVFDEGK | AGTCTGGCCAAGGAAAAGACACAGACCTTGCACAAATTTATA |
| | SWHSETKNSLMQDR | CTACTTTTTGCTGTATTTGATGAAGGGAAAAGTTGGCACTCAG |
| | DAASARAWPKMHTV | AAACAAAGAACTCCTTGATGCAGGATAGGGATGCTGCATCTG |
| | NGYVNRSLPGLIGCH | CTCGGGCCTGGCCTAAAATGCACACAGTCAATGGTTATGTAAA |
| | RKSVYWHVIGMGTT | CAGGTCTCTGCCAGGTCTGATTGGATGCCACAGGAAATCAGTC |
| | PEVHSIFLEGHTFLVR | TATTGGCATGTGATTGGAATGGGCACCACTCCTGAAGTGCACT |
| | NHRQASLEISPITFLT | CAATATTCCTCGAAGGTCACACATTTCTTGTGAGGAACCATCG |
| | AQTLLMDLGQFLLFC | CCAGGCTAGCTTGGAAATCTCGCCAATAACTTTCCTTACTGCT |
| | HISSHQHDGMEAYVK | CAAACACTCTTGATGGACCTTGGACAGTTTCTACTGTTTTGTCA |
| | VDSCPEEPGAPGSPA | TATCTCTTCCCACCAACATGATGGCATGGAAGCTTATGTCAAA |
| | GSPTSTEEGTSESATP | GTAGACAGCTGTCCAGAGGAACCCGGCGCGCCAGGTTCTCCTG |
| | ESGPGSEPATSGSETP | CTGGCTCCCCCACCTCAACAGAAGAGGGGACAAGCGAAAGCG |
| | ASSVQLQLRMKNNEE | CTACGCCTGAGAGTGGCCCTGGCTCTGAGCCAGCCACCTCCGG |
| | AEDYDDDLTDSEMD | CTCTGAAACCCCTGCCTCGAGCGTGCAACTTCAACTACGAATG |
| | VVRFDDDNSPSFIQIR | AAAAATAATGAAGAAGCGGAAGACTATGATGATGATCTTACT |
| | SVAKKHPKTWVHYI | GATTCTGAAATGGATGTGGTCAGGTTTGATGATGACAACTCTC |
| | AAEEEDWDYAPLVL | CTTCCTTTATCCAAATTCGCTCAGTTGCCAAGAAGCATCCTAA |
| | APDDRSYKSQYLNNG | AACTTGGGTACATTACATTGCTGCTGAAGAGGAGGACTGGGA |
| | PQRIGRKYKKVRFMA | CTATGCTCCCTTAGTCCTCGCCCCCGATGACAGAAGTTATAAA |
| | YTDETFKTREAIQHES | AGTCAATATTTGAACAATGGCCCTCAGCGGATTGGTAGGAAGT |
| | GILGPLLYGEVGDTL | ACAAAAAAGTCCGATTTATGGCATACACAGATGAAACCTTTAA |
| | LIIFKNQASRPYNIYP | GACTCGTGAAGCTATTCAGCATGAATCAGGAATCTTGGGACCT |
| | HGITDVRPLYSRRLPK | TTACTTTATGGGGAAGTTGGAGACACACTGTTGATTATATTTA |
| | GVKHLKDFPILPGEIF | AGAATCAAGCAAGCAGACCATATAACATCTACCCTCACGGAA |
| | KYKWTVTVEDGPTK | TCACTGATGTCCGTCCTTTGTATTCAAGGAGATTACCAAAAGG |
| | SDPRCLTRYYSSFVN | TGTAAAACATTTGAAGGATTTTCCAATTCTGCCAGGAGAAATA |
| | MERDLASGLIGPLLIC | TTCAAATATAAATGGACAGTGACTGTAGAAGATGGGCCAACT |
| | YKESVDQRGNQIMSD | AAATCAGATCCTCGGTGCCTGACCCGCTATTACTCTAGTTTCGT |
| | KRNVILFSVFDENRS | TAATATGGAGAGAGATCTAGCTTCAGGACTCATTGGCCCTCTC |
| | WYLTENIQRFLPNPA | CTCATCTGCTACAAAGAATCTGTAGATCAAAGAGGAAACCAG |
| | GVQLEDPEFQASNIM | ATAATGTCAGACAAGAGGAATGTCATCCTGTTTTCTGTATTTG |
| | HSINGYVFDSLQLSV | ATGAGAACCGAAGCTGGTACCTCACAGAGAATATACAACGCT |
| | CLHEVAYWYILSIGA | TTCTCCCCAATCCAGCTGGAGTGCAGCTTGAGGATCCAGAGTT |
| | QTDFLSVFFSGYTFK | CCAAGCCTCCAACATCATGCACAGCATCAATGGCTATGTTTTT |
| | HKMVYEDTLTLFPFS | GATAGTTTGCAGTTGTCAGTTTGTTTGCATGAGGTGGCATACT |
| | GETVFMSMENPGLWI | GGTACATTCTAAGCATTGGAGCACAGACTGACTTCCTTTCTGT |
| | LGCHNSDFRNRGMT | CTTCTTCTCTGGATATACCTTCAAACACAAAATGGTCTATGAA |
| | ALLKVSSCDKNTGDY | GACACACTCACCCTATTCCCATTCTCAGGAGAAACTGTCTTCA |
| | YEDSYEDISAYLLSK | TGTCGATGGAAAACCCAGGTCTATGGATTCTGGGGTGCCACAA |
| | NNAIEPRSFSQNPPVL | CTCAGACTTTCGGAACAGAGGCATGACCGCCTTACTGAAGGTT |
| | KRHQREITRTTLQSD | TCTAGTTGTGACAAGAACACTGGTGATTATTACGAGGACAGTT |
| | QEEIDYDDTISVEMK | ATGAAGATATTTCAGCATACTTGCTGAGTAAAAACAATGCCAT |
| | KEDFDIYDEDENQSP | TGAACCAAGAAGCTTCTCTCAAAACCCACCAGTCTTGAAACGC |
| | RSFQKKTRHYFIAAV | CATCAACGGGAAATAACTCGTACTACTCTTCAGTCAGATCAAG |
| | ERLWDYGMSSSPHVL | AGGAAATCGATTATGATGATACCATATCAGTTGAAATGAAGA |
| | RNRAQSGSVPQFKKV | AGGAAGATTTTGACATTTATGATGAGGATGAAAATCAGAGCC |
| | VFQEFTDGSFTQPLY | CCCGCAGCTTTCAAAAGAAAACACGACACTATTTTATTGCTGC |
| | RGELNEHLGLLGPYI | AGTGGAGAGGCTCTGGGATTATGGGATGAGTAGCTCCCCACAT |
| | RAEVEDNIMVTFRNQ | GTTCTAAGAAACAGGGCTCAGAGTGGCAGTGTCCCTCAGTTCA |
| | ASRPYSFYSSLISYEE | AGAAAGTTGTTTTCCAGGAATTTACTGATGGCTCCTTTACTCA |
| | DQRQGAEPRKNFVKP | GCCCTTATACCGTGGAGAACTAAATGAACATTTGGGACTCCTG |
| | NETKTYFWKVQHHM | GGGCCATATATAAGAGCAGAAGTTGAAGATAATATCATGGTA |
| | APTKDEFDCKAWAY | ACTTTCAGAAATCAGGCCTCTCGTCCCTATTCCTTCTATTCTAG |
| | FSDVDLEKDVHSGLI | CCTTATTTCTTATGAGGAAGATCAGAGGCAAGGAGCAGAACCT |
| | GPLLVCHTNTLNPAH | AGAAAAAACTTTGTCAAGCCTAATGAAACCAAAACTTACTTTT |
| | GRQVTVQEFALFFTIF | GGAAAGTGCAACATCATATGGCACCCACTAAAGATGAGTTTG |
| | DETKSWYFTENMER | ACTGCAAAGCCTGGGCTTATTTCTCTGATGTTGACCTGGAAAA |
| | NCRAPCNIQMEDPTF | AGATGTGCACTCAGGCCTGATTGGACCCCTTCTGGTCTGCCAC |
| | KENYRFHAINGYIMD | ACTAACACACTGAACCCTGCTCATGGGAGACAAGTGACAGTA |
| | TLPGLVMAQDQRIR | CAGGAATTTGCTCTGTTTTTCACCATCTTTGATGAGACCAAAA |
| | WYLLSMGSNENIHSI | GCTGGTACTTCACTGAAAATATGGAAAGAAACTGCAGGGCTC |
| | HFSGHVFTVRKKEEY | CCTGCAATATCCAGATGGAAGATCCCACTTTTAAAGAGAATTA |
| | KMALYNLYPGVFET | TCGCTTCCATGCAATCAATGGCTACATAATGGATACACTACCT |
| | VEMLPSKAGIWRVEC | GGCTTAGTAATGGCTCAGGATCAAAGGATTCGATGGTATCTGC |
| | LIGEHLHAGMSTLFL | TCAGCATGGGCAGCAATGAAAACATCCATTCTATTCATTTCAG |
| | VYSNKCQTPLGMAS | TGGACATGTGTTCACTGTACGAAAAAAAGAGGAGTATAAAAT |
| | GHIRDFQITASGQYG | GGCACTGTACAATCTCTATCCAGGTGTTTTTGAGACAGTGGAA |
| | QWAPKLARLHYSGSI | ATGTTACCATCCAAAGCTGGAATTTGGCGGGTGGAATGCCTTA |
| | NAWSTKEPFSWIKVD | TTGGCGAGCATCTACATGCTGGGATGAGCACACTTTTTCTGGT |
| | LLAPMIIHGIKTQGAR | GTACAGCAATAAGTGTCAGACTCCCCTGGGAATGGCTTCTGGA |
| | QKFSSLYISQFIIMYSL | CACATTAGAGATTTTCAGATTACAGCTTCAGGACAATATGGAC |
| | DGKKWQTYRGNSTG | AGTGGGCCCCAAAGCTGGCCAGACTTCATTATTCCGGATCAAT |
| | TLMVFFGNVDSSGIK | CAATGCCTGGAGCACCAAGGAGCCCTTTTCTTGGATCAAGGTG |
| | HNIFNPPIIARYIRLHP | GATCTGTTGGCACCAATGATTATTCACGGCATCAAGACCCAGG |
| | THYSIRSTLRMELMG | GTGCCCGTCAGAAGTTCTCCAGCCTCTACATCTCTCAGTTTATC |
| | CDLNSCSMPLGMESK | ATCATGTATAGTCTTGATGGGAAGAAGTGGCAGACTTATCGAG |
| | AISDAQITASSYFTNM | GAAATTCCACTGGAACCTTAATGGTCTTCTTTGGCAATGTGGA |
| | FATWSPSKARLHLQG | TTCATCTGGGATAAAACACAATATTTTTAACCCTCCAATTATTG |
| | RSNAWRPQVNNPKE | CTCGATACATCCGTTTGCACCCAACTCATTATAGCATTCGCAG |
| | WLQVDFQKTMKVTG | CACTCTTCGCATGGAGTTGATGGGCTGTGATTTAAATAGTTGC |
| | VTTQGVKSLLTSMYV | AGCATGCCATTGGGAATGGAGAGTAAAGCAATATCAGATGCA |
| | KEFLISSSQDGHQWT | CAGATTACTGCTTCATCCTACTTTACCAATATGTTTGCCACCTG |
| | LFFQNGKVKVFQGN | GTCTCCTTCAAAAGCTCGACTTCACCTCCAAGGGAGGAGTAAT |
| | QDSFTPVVNSLDPPLL | GCCTGGAGACCTCAGGTGAATAATCCAAAAGAGTGGCTGCAA |
| | TRYLRIHPQSWVHQI | GTGGACTTCCAGAAGACAATGAAAGTCACAGGAGTAACTACT |
| | ALRMEVLGCEAQDL | CAGGGAGTAAAATCTCTGCTTACCAGCATGTATGTGAAGGAGT |
| | YGAGSPGAETAEQKL | TCCTCATCTCCAGCAGTCAAGATGGCCATCAGTGGACTCTCTT |
| | ISEEDLSPATG | TTTTCAGAATGGCAAAGTAAAGGTTTTTCAGGGAAATCAAGAC |
| | | TCCTTCACACCTGTGGTGAACTCTCTAGACCCACCGTTACTGA |
| | | CTCGCTACCTTCGAATTCACCCCCAGAGTTGGGTGCACCAGAT |
| | | TGCCCTGAGGATGGAGGTTCTGGGCTGCGAGGCACAGGACCT |
| | | CTACGGCGCCGGATCACCTGGGGCCGAAACGGCCGAACAAAA |
| | | ACTCATCTCAGAAGAGGATCTGTCACCTGCAACCGGTTGA |
| pBC0131 | MQIELSTCFFLCLLRF | ATGCAAATAGAGCTCTCCACCTGCTTCTTTCTGTGCCTTTTGCG |
| | CFSATRRYYLGAVEL | ATTCTGCTTTAGTGCCACCAGAAGATACTACCTGGGTGCAGTG |
| | SWDYMQSDLGELPV | GAACTGTCATGGGACTATATGCAAAGTGATCTCGGTGAGCTGC |
| | DARFPPRVPKSFPFNT | CTGTGGACGCAAGATTTCCTCCTAGAGTGCCAAAATCTTTTCC |
| | SVVYKKTLFVEFTDH | ATTCAACACCTCAGTCGTGTACAAAAAGACTCTGTTTGTAGAA |
| | LFNIAKPRPPWMGLL | TTCACGGATCACCTTTTCAACATCGCTAAGCCAAGGCCACCCT |
| | GPTIQAEVYDTVVITL | GGATGGGTCTGCTAGGTCCTACCATCCAGGCTGAGGTTTATGA |
| | KNMASHPVSLHAVG | TACAGTGGTCATTACACTTAAGAACATGGCTTCCCATCCTGTC |
| | VSYWKASEGAEYDD | AGTCTTCATGCTGTTGGTGTATCCTACTGGAAAGCTTCTGAGG |
| | QTSQREKEDDKVFPG | GAGCTGAATATGATGATCAGACCAGTCAAAGGGAGAAAGAAG |
| | GSHTYVWQVLKENG | ATGATAAAGTCTTCCCTGGTGGAAGCCATACATATGTCTGGCA |
| | PMASDPLCLTYSYLS | GGTCCTGAAAGAGAATGGTCCAATGGCCTCTGACCCACTGTGC |
| | HVDLVKDLNSGLIGA | CTTACCTACTCATATCTTTCTCATGTGGACCTGGTAAAAGACTT |
| | LLVCREGSLAKEKTQ | GAATTCAGGCCTCATTGGAGCCCTACTAGTATGTAGAGAAGGG |
| | TLHKFILLFAVFDEGK | AGTCTGGCCAAGGAAAAGACACAGACCTTGCACAAATTTATA |
| | SWHSETKNSLMQDR | CTACTTTTTGCTGTATTTGATGAAGGGAAAAGTTGGCACTCAG |
| | DAASARAWPKMHTV | AAACAAAGAACTCCTTGATGCAGGATAGGGATGCTGCATCTG |
| | NGYVNRSLPGLIGCH | CTCGGGCCTGGCCTAAAATGCACACAGTCAATGGTTATGTAAA |
| | RKSVYWHVIGMGTT | CAGGTCTCTGCCAGGTCTGATTGGATGCCACAGGAAATCAGTC |
| | PEVHSIFLEGHTFLVR | TATTGGCATGTGATTGGAATGGGCACCACTCCTGAAGTGCACT |
| | NHRQASLEISPITFLT | CAATATTCCTCGAAGGTCACACATTTCTTGTGAGGAACCATCG |
| | AQTLLMDLGQFLLFC | CCAGGCTAGCTTGGAAATCTCGCCAATAACTTTCCTTACTGCT |
| | HISSHQHDGMEAYVK | CAAACACTCTTGATGGACCTTGGACAGTTTCTACTGTTTTGTCA |
| | VDSCPEEPQLRMKNN | TATCTCTTCCCACCAACATGATGGCATGGAAGCTTATGTCAAA |
| | EEAEDYDDDLTDSEM | GTAGACAGCTGTCCAGAGGAACCCCAACTACGAATGAAAAAT |
| | DVVRFDDDNSPSFIQI | AATGAAGAAGCGGAAGACTATGATGATGATCTTACTGATTCTG |
| | RSVASVAGAPGSPAG | AAATGGATGTGGTCAGGTTTGATGATGACAACTCTCCTTCCTT |
| | SPTSTEEGTSESATPE | TATCCAAATTCGCTCAGTTGCCTCTGTAGCAGGCGCGCCAGGT |
| | SGPGSEPATSGSETPA | TCTCCTGCTGGCTCCCCCACCTCAACAGAAGAGGGGACAAGCG |
| | SSKKHPKTWVHYIAA | AAAGCGCTACGCCTGAGAGTGGCCCTGGCTCTGAGCCAGCCA |
| | EEEDWDYAPLVLAPD | CCTCCGGCTCTGAAACCCCTGCCTCGAGCAAGAAGCATCCTAA |
| | DRSYKSQYLNNGPQR | AACTTGGGTACATTACATTGCTGCTGAAGAGGAGGACTGGGA |
| | IGRKYKKVRFMAYT | CTATGCTCCCTTAGTCCTCGCCCCCGATGACAGAAGTTATAAA |
| | DETFKTREAIQHESGI | AGTCAATATTTGAACAATGGCCCTCAGCGGATTGGTAGGAAGT |
| | LGPLLYGEVGDTLLII | ACAAAAAAGTCCGATTTATGGCATACACAGATGAAACCTTTAA |
| | FKNQASRPYNIYPHGI | GACTCGTGAAGCTATTCAGCATGAATCAGGAATCTTGGGACCT |
| | TDVRPLYSRRLPKGV | TTACTTTATGGGGAAGTTGGAGACACACTGTTGATTATATTTA |
| | KHLKDFPILPGEIFKY | AGAATCAAGCAAGCAGACCATATAACATCTACCCTCACGGAA |
| | KWTVTVEDGPTKSDP | TCACTGATGTCCGTCCTTTGTATTCAAGGAGATTACCAAAAGG |
| | RCLTRYYSSFVNMER | TGTAAAACATTTGAAGGATTTTCCAATTCTGCCAGGAGAAATA |
| | DLASGLIGPLLICYKE | TTCAAATATAAATGGACAGTGACTGTAGAAGATGGGCCAACT |
| | SVDQRGNQIMSDKRN | AAATCAGATCCTCGGTGCCTGACCCGCTATTACTCTAGTTTCGT |
| | VILFSVFDENRSWYL | TAATATGGAGAGAGATCTAGCTTCAGGACTCATTGGCCCTCTC |
| | TENIQRFLPNPAGVQL | CTCATCTGCTACAAAGAATCTGTAGATCAAAGAGGAAACCAG |
| | EDPEFQASNIMHSING | ATAATGTCAGACAAGAGGAATGTCATCCTGTTTTCTGTATTTG |
| | YVFDSLQLSVCLHEV | ATGAGAACCGAAGCTGGTACCTCACAGAGAATATACAACGCT |
| | AYWYILSIGAQTDFLS | TTCTCCCCAATCCAGCTGGAGTGCAGCTTGAGGATCCAGAGTT |
| | VFFSGYTFKHKMVYE | CCAAGCCTCCAACATCATGCACAGCATCAATGGCTATGTTTTT |
| | DTLTLFPFSGETVFMS | GATAGTTTGCAGTTGTCAGTTTGTTTGCATGAGGTGGCATACT |
| | MENPGLWILGCHNSD | GGTACATTCTAAGCATTGGAGCACAGACTGACTTCCTTTCTGT |
| | FRNRGMTALLKVSSC | CTTCTTCTCTGGATATACCTTCAAACACAAAATGGTCTATGAA |
| | DKNTGDYYEDSYEDI | GACACACTCACCCTATTCCCATTCTCAGGAGAAACTGTCTTCA |
| | SAYLLSKNNAIEPRSF | TGTCGATGGAAAACCCAGGTCTATGGATTCTGGGGTGCCACAA |
| | SQNPPVLKRHQREITR | CTCAGACTTTCGGAACAGAGGCATGACCGCCTTACTGAAGGTT |
| | TTLQSDQEEIDYDDTI | TCTAGTTGTGACAAGAACACTGGTGATTATTACGAGGACAGTT |
| | SVEMKKEDFDIYDED | ATGAAGATATTTCAGCATACTTGCTGAGTAAAAACAATGCCAT |
| | ENQSPRSFQKKTRHY | TGAACCAAGAAGCTTCTCTCAAAACCCACCAGTCTTGAAACGC |
| | FIAAVERLWDYGMSS | CATCAACGGGAAATAACTCGTACTACTCTTCAGTCAGATCAAG |
| | SPHVLRNRAQSGSVP | AGGAAATCGATTATGATGATACCATATCAGTTGAAATGAAGA |
| | QFKKVVFQEFTDGSF | AGGAAGATTTTGACATTTATGATGAGGATGAAAATCAGAGCC |
| | TQPLYRGELNEHLGL | CCCGCAGCTTTCAAAAGAAAACACGACACTATTTTATTGCTGC |
| | LGPYIRAEVEDNIMV | AGTGGAGAGGCTCTGGGATTATGGGATGAGTAGCTCCCCACAT |
| | TFRNQASRPYSFYSSL | GTTCTAAGAAACAGGGCTCAGAGTGGCAGTGTCCCTCAGTTCA |
| | ISYEEDQRQGAEPRK | AGAAAGTTGTTTTCCAGGAATTTACTGATGGCTCCTTTACTCA |
| | NFVKPNETKTYFWK | GCCCTTATACCGTGGAGAACTAAATGAACATTTGGGACTCCTG |
| | VQHHMAPTKDEFDC | GGGCCATATATAAGAGCAGAAGTTGAAGATAATATCATGGTA |
| | KAWAYFSDVDLEKD | ACTTTCAGAAATCAGGCCTCTCGTCCCTATTCCTTCTATTCTAG |
| | VHSGLIGPLLVCHTN | CCTTATTTCTTATGAGGAAGATCAGAGGCAAGGAGCAGAACCT |
| | TLNPAHGRQVTVQEF | AGAAAAAACTTTGTCAAGCCTAATGAAACCAAAACTTACTTTT |
| | ALFFTIFDETKSWYFT | GGAAAGTGCAACATCATATGGCACCCACTAAAGATGAGTTTG |
| | ENMERNCRAPCNIQM | ACTGCAAAGCCTGGGCTTATTTCTCTGATGTTGACCTGGAAAA |
| | EDPTFKENYRFHAIN | AGATGTGCACTCAGGCCTGATTGGACCCCTTCTGGTCTGCCAC |
| | GYIMDTLPGLVMAQ | ACTAACACACTGAACCCTGCTCATGGGAGACAAGTGACAGTA |
| | DQRIRWYLLSMGSNE | CAGGAATTTGCTCTGTTTTTCACCATCTTTGATGAGACCAAAA |
| | NIHSIHFSGHVFTVRK | GCTGGTACTTCACTGAAAATATGGAAAGAAACTGCAGGGCTC |
| | KEEYKMALYNLYPG | CCTGCAATATCCAGATGGAAGATCCCACTTTTAAAGAGAATTA |
| | VFETVEMLPSKAGIW | TCGCTTCCATGCAATCAATGGCTACATAATGGATACACTACCT |
| | RVECLIGEHLHAGMS | GGCTTAGTAATGGCTCAGGATCAAAGGATTCGATGGTATCTGC |
| | TLFLVYSNKCQTPLG | TCAGCATGGGCAGCAATGAAAACATCCATTCTATTCATTTCAG |
| | MASGHIRDFQITASG | TGGACATGTGTTCACTGTACGAAAAAAAGAGGAGTATAAAAT |
| | QYGQWAPKLARLHY | GGCACTGTACAATCTCTATCCAGGTGTTTTTGAGACAGTGGAA |
| | SGSINAWSTKEPFSWI | ATGTTACCATCCAAAGCTGGAATTTGGCGGGTGGAATGCCTTA |
| | KVDLLAPMIIHGIKTQ | TTGGCGAGCATCTACATGCTGGGATGAGCACACTTTTTCTGGT |
| | GARQKFSSLYISQFII | GTACAGCAATAAGTGTCAGACTCCCCTGGGAATGGCTTCTGGA |
| | MYSLDGKKWQTYRG | CACATTAGAGATTTTCAGATTACAGCTTCAGGACAATATGGAC |
| | NSTGTLMVFFGNVDS | AGTGGGCCCCAAAGCTGGCCAGACTTCATTATTCCGGATCAAT |
| | SGIKHNIFNPPIIARYI | CAATGCCTGGAGCACCAAGGAGCCCTTTTCTTGGATCAAGGTG |
| | RLHPTHYSIRSTLRME | GATCTGTTGGCACCAATGATTATTCACGGCATCAAGACCCAGG |
| | LMGCDLNSCSMPLG | GTGCCCGTCAGAAGTTCTCCAGCCTCTACATCTCTCAGTTTATC |
| | MESKAISDAQITASSY | ATCATGTATAGTCTTGATGGGAAGAAGTGGCAGACTTATCGAG |
| | FTNMFATWSPSKARL | GAAATTCCACTGGAACCTTAATGGTCTTCTTTGGCAATGTGGA |
| | HLQGRSNAWRPQVN | TTCATCTGGGATAAAACACAATATTTTTAACCCTCCAATTATTG |
| | NPKEWLQVDFQKTM | CTCGATACATCCGTTTGCACCCAACTCATTATAGCATTCGCAG |
| | KVTGVTTQGVKSLLT | CACTCTTCGCATGGAGTTGATGGGCTGTGATTTAAATAGTTGC |
| | SMYVKEFLISSSQDG | AGCATGCCATTGGGAATGGAGAGTAAAGCAATATCAGATGCA |
| | HQWTLFFQNGKVKV | CAGATTACTGCTTCATCCTACTTTACCAATATGTTTGCCACCTG |
| | FQGNQDSFTPVVNSL | GTCTCCTTCAAAAGCTCGACTTCACCTCCAAGGGAGGAGTAAT |
| | DPPLLTRYLRIHPQSW | GCCTGGAGACCTCAGGTGAATAATCCAAAAGAGTGGCTGCAA |
| | VHQIALRMEVLGCEA | GTGGACTTCCAGAAGACAATGAAAGTCACAGGAGTAACTACT |
| | QDLYGAGSPGAETAE | CAGGGAGTAAAATCTCTGCTTACCAGCATGTATGTGAAGGAGT |
| | QKLISEEDLSPATG | TCCTCATCTCCAGCAGTCAAGATGGCCATCAGTGGACTCTCTT |
| | | TTTTCAGAATGGCAAAGTAAAGGTTTTTCAGGGAAATCAAGAC |
| | | TCCTTCACACCTGTGGTGAACTCTCTAGACCCACCGTTACTGA |
| | | CTCGCTACCTTCGAATTCACCCCCAGAGTTGGGTGCACCAGAT |
| | | TGCCCTGAGGATGGAGGTTCTGGGCTGCGAGGCACAGGACCT |
| | | CTACGGCGCCGGATCACCTGGGGCCGAAACGGCCGAACAAAA |
| | | ACTCATCTCAGAAGAGGATCTGTCACCTGCAACCGGTTGA |
| pBC0132 | MQIELSTCFFLCLLRF | ATGCAAATAGAGCTCTCCACCTGCTTCTTTCTGTGCCTTTTGCG |
| | CFSATRRYYLGAVEL | ATTCTGCTTTAGTGCCACCAGAAGATACTACCTGGGTGCAGTG |
| | SWDYMQSDLGELPV | GAACTGTCATGGGACTATATGCAAAGTGATCTCGGTGAGCTGC |
| | DARFPPRVPKSFPFNT | CTGTGGACGCAAGATTTCCTCCTAGAGTGCCAAAATCTTTTCC |
| | SVVYKKTLFVEFTDH | ATTCAACACCTCAGTCGTGTACAAAAAGACTCTGTTTGTAGAA |
| | LFNIAKPRPPWMGLL | TTCACGGATCACCTTTTCAACATCGCTAAGCCAAGGCCACCCT |
| | GPTIQAEVYDTVVITL | GGATGGGTCTGCTAGGTCCTACCATCCAGGCTGAGGTTTATGA |
| | KNMASHPVSLHAVG | TACAGTGGTCATTACACTTAAGAACATGGCTTCCCATCCTGTC |
| | VSYWKASEGAEYDD | AGTCTTCATGCTGTTGGTGTATCCTACTGGAAAGCTTCTGAGG |
| | QTSQREKEDDKVFPG | GAGCTGAATATGATGATCAGACCAGTCAAAGGGAGAAAGAAG |
| | GSHTYVWQVLKENG | ATGATAAAGTCTTCCCTGGTGGAAGCCATACATATGTCTGGCA |
| | PMASDPLCLTYSYLS | GGTCCTGAAAGAGAATGGTCCAATGGCCTCTGACCCACTGTGC |
| | HVDLVKDLNSGLIGA | CTTACCTACTCATATCTTTCTCATGTGGACCTGGTAAAAGACTT |
| | LLVCREGSLAKEKTQ | GAATTCAGGCCTCATTGGAGCCCTACTAGTATGTAGAGAAGGG |
| | TLHKFILLFAVFDEGK | AGTCTGGCCAAGGAAAAGACACAGACCTTGCACAAATTTATA |
| | SWHSETKNSLMQDR | CTACTTTTTGCTGTATTTGATGAAGGGAAAAGTTGGCACTCAG |
| | DAASARAWPKMHTV | AAACAAAGAACTCCTTGATGCAGGATAGGGATGCTGCATCTG |
| | NGYVNRSLPGLIGCH | CTCGGGCCTGGCCTAAAATGCACACAGTCAATGGTTATGTAAA |
| | RKSVYWHVIGMGTT | CAGGTCTCTGCCAGGTCTGATTGGATGCCACAGGAAATCAGTC |
| | PEVHSIFLEGHTFLVR | TATTGGCATGTGATTGGAATGGGCACCACTCCTGAAGTGCACT |
| | NHRQASLEISPITFLT | CAATATTCCTCGAAGGTCACACATTTCTTGTGAGGAACCATCG |
| | AQTLLMDLGQFLLFC | CCAGGCTAGCTTGGAAATCTCGCCAATAACTTTCCTTACTGCT |
| | HISSHQHDGMEAYVK | CAAACACTCTTGATGGACCTTGGACAGTTTCTACTGTTTTGTCA |
| | VDSCPEEPQLRMKNN | TATCTCTTCCCACCAACATGATGGCATGGAAGCTTATGTCAAA |
| | EEAEDYDDDLTDSEM | GTAGACAGCTGTCCAGAGGAACCCCAACTACGAATGAAAAAT |
| | DVVRFDDDNSPSFIQI | AATGAAGAAGCGGAAGACTATGATGATGATCTTACTGATTCTG |
| | RSVAKKHPKTWVHYI | AAATGGATGTGGTCAGGTTTGATGATGACAACTCTCCTTCCTT |
| | AAEEEDWDYAPLVL | TATCCAAATTCGCTCAGTTGCCAAGAAGCATCCTAAAACTTGG |
| | APDGAPGSPAGSPTST | GTACATTACATTGCTGCTGAAGAGGAGGACTGGGACTATGCTC |
| | EEGTSESATPESGPGS | CCTTAGTCCTCGCCCCCGATGGCGCGCCAGGTTCTCCTGCTGG |
| | EPATSGSETPASSDRS | CTCCCCCACCTCAACAGAAGAGGGGACAAGCGAAAGCGCTAC |
| | YKSQYLNNGPQRIGR | GCCTGAGAGTGGCCCTGGCTCTGAGCCAGCCACCTCCGGCTCT |
| | KYKKVRFMAYTDET | GAAACCCCTGCCTCGAGCGACAGAAGTTATAAAAGTCAATATT |
| | FKTREAIQHESGILGP | TGAACAATGGCCCTCAGCGGATTGGTAGGAAGTACAAAAAAG |
| | LLYGEVGDTLLIIFKN | TCCGATTTATGGCATACACAGATGAAACCTTTAAGACTCGTGA |
| | QASRPYNIYPHGITDV | AGCTATTCAGCATGAATCAGGAATCTTGGGACCTTTACTTTAT |
| | RPLYSRRLPKGVKHL | GGGGAAGTTGGAGACACACTGTTGATTATATTTAAGAATCAAG |
| | KDFPILPGEIFKYKWT | CAAGCAGACCATATAACATCTACCCTCACGGAATCACTGATGT |
| | VTVEDGPTKSDPRCL | CCGTCCTTTGTATTCAAGGAGATTACCAAAAGGTGTAAAACAT |
| | TRYYSSFVNMERDLA | TTGAAGGATTTTCCAATTCTGCCAGGAGAAATATTCAAATATA |
| | SGLIGPLLICYKESVD | AATGGACAGTGACTGTAGAAGATGGGCCAACTAAATCAGATC |
| | QRGNQIMSDKRNVIL | CTCGGTGCCTGACCCGCTATTACTCTAGTTTCGTTAATATGGAG |
| | FSVFDENRSWYLTEN | AGAGATCTAGCTTCAGGACTCATTGGCCCTCTCCTCATCTGCT |
| | IQRFLPNPAGVQLEDP | ACAAAGAATCTGTAGATCAAAGAGGAAACCAGATAATGTCAG |
| | EFQASNIMHSINGYVF | ACAAGAGGAATGTCATCCTGTTTTCTGTATTTGATGAGAACCG |
| | DSLQLSVCLHEVAY | AAGCTGGTACCTCACAGAGAATATACAACGCTTTCTCCCCAAT |
| | WYILSIGAQTDFLSVF | CCAGCTGGAGTGCAGCTTGAGGATCCAGAGTTCCAAGCCTCCA |
| | FSGYTFKHKMVYEDT | ACATCATGCACAGCATCAATGGCTATGTTTTTGATAGTTTGCA |
| | LTLFPFSGETVFMSM | GTTGTCAGTTTGTTTGCATGAGGTGGCATACTGGTACATTCTA |
| | ENPGLWILGCHNSDF | AGCATTGGAGCACAGACTGACTTCCTTTCTGTCTTCTTCTCTGG |
| | RNRGMTALLKVSSCD | ATATACCTTCAAACACAAAATGGTCTATGAAGACACACTCACC |
| | KNTGDYYEDSYEDIS | CTATTCCCATTCTCAGGAGAAACTGTCTTCATGTCGATGGAAA |
| | AYLLSKNNAIEPRSFS | ACCCAGGTCTATGGATTCTGGGGTGCCACAACTCAGACTTTCG |
| | QNPPVLKRHQREITR | GAACAGAGGCATGACCGCCTTACTGAAGGTTTCTAGTTGTGAC |
| | TTLQSDQEEIDYDDTI | AAGAACACTGGTGATTATTACGAGGACAGTTATGAAGATATTT |
| | SVEMKKEDFDIYDED | CAGCATACTTGCTGAGTAAAAACAATGCCATTGAACCAAGAA |
| | ENQSPRSFQKKTRHY | GCTTCTCTCAAAACCCACCAGTCTTGAAACGCCATCAACGGGA |
| | FIAAVERLWDYGMSS | AATAACTCGTACTACTCTTCAGTCAGATCAAGAGGAAATCGAT |
| | SPHVLRNRAQSGSVP | TATGATGATACCATATCAGTTGAAATGAAGAAGGAAGATTTTG |
| | QFKKVVFQEFTDGSF | ACATTTATGATGAGGATGAAAATCAGAGCCCCCGCAGCTTTCA |
| | TQPLYRGELNEHLGL | AAAGAAAACACGACACTATTTTATTGCTGCAGTGGAGAGGCTC |
| | LGPYIRAEVEDNIMV | TGGGATTATGGGATGAGTAGCTCCCCACATGTTCTAAGAAACA |
| | TFRNQASRPYSFYSSL | GGGCTCAGAGTGGCAGTGTCCCTCAGTTCAAGAAAGTTGTTTT |
| | ISYEEDQRQGAEPRK | CCAGGAATTTACTGATGGCTCCTTTACTCAGCCCTTATACCGTG |
| | NFVKPNETKTYFWK | GAGAACTAAATGAACATTTGGGACTCCTGGGGCCATATATAA |
| | VQHHMAPTKDEFDC | GAGCAGAAGTTGAAGATAATATCATGGTAACTTTCAGAAATC |
| | KAWAYFSDVDLEKD | AGGCCTCTCGTCCCTATTCCTTCTATTCTAGCCTTATTTCTTATG |
| | VHSGLIGPLLVCHTN | AGGAAGATCAGAGGCAAGGAGCAGAACCTAGAAAAAACTTTG |
| | TLNPAHGRQVTVQEF | TCAAGCCTAATGAAACCAAAACTTACTTTTGGAAAGTGCAACA |
| | ALFFTIFDETKSWYFT | TCATATGGCACCCACTAAAGATGAGTTTGACTGCAAAGCCTGG |
| | ENMERNCRAPCNIQM | GCTTATTTCTCTGATGTTGACCTGGAAAAAGATGTGCACTCAG |
| | EDPTFKENYRFHAIN | GCCTGATTGGACCCCTTCTGGTCTGCCACACTAACACACTGAA |
| | GYIMDTLPGLVMAQ | CCCTGCTCATGGGAGACAAGTGACAGTACAGGAATTTGCTCTG |
| | DQRIRWYLLSMGSNE | TTTTTCACCATCTTTGATGAGACCAAAAGCTGGTACTTCACTG |
| | NIHSIHFSGHVFTVRK | AAAATATGGAAAGAAACTGCAGGGCTCCCTGCAATATCCAGA |
| | KEEYKMALYNLYPG | TGGAAGATCCCACTTTTAAAGAGAATTATCGCTTCCATGCAAT |
| | VFETVEMLPSKAGIW | CAATGGCTACATAATGGATACACTACCTGGCTTAGTAATGGCT |
| | RVECLIGEHLHAGMS | CAGGATCAAAGGATTCGATGGTATCTGCTCAGCATGGGCAGC |
| | TLFLVYSNKCQTPLG | AATGAAAACATCCATTCTATTCATTTCAGTGGACATGTGTTCA |
| | MASGHIRDFQITASG | CTGTACGAAAAAAAGAGGAGTATAAAATGGCACTGTACAATC |
| | QYGQWAPKLARLHY | TCTATCCAGGTGTTTTTGAGACAGTGGAAATGTTACCATCCAA |
| | SGSINAWSTKEPFSWI | AGCTGGAATTTGGCGGGTGGAATGCCTTATTGGCGAGCATCTA |
| | KVDLLAPMIIHGIKTQ | CATGCTGGGATGAGCACACTTTTTCTGGTGTACAGCAATAAGT |
| | GARQKFSSLYISQFII | GTCAGACTCCCCTGGGAATGGCTTCTGGACACATTAGAGATTT |
| | MYSLDGKKWQTYRG | TCAGATTACAGCTTCAGGACAATATGGACAGTGGGCCCCAAA |
| | NSTGTLMVFFGNVDS | GCTGGCCAGACTTCATTATTCCGGATCAATCAATGCCTGGAGC |
| | SGIKHNIFNPPIIARYI | ACCAAGGAGCCCTTTTCTTGGATCAAGGTGGATCTGTTGGCAC |
| | RLHPTHYSIRSTLRME | CAATGATTATTCACGGCATCAAGACCCAGGGTGCCCGTCAGAA |
| | LMGCDLNSCSMPLG | GTTCTCCAGCCTCTACATCTCTCAGTTTATCATCATGTATAGTC |
| | MESKAISDAQITASSY | TTGATGGGAAGAAGTGGCAGACTTATCGAGGAAATTCCACTG |
| | FTNMFATWSPSKARL | GAACCTTAATGGTCTTCTTTGGCAATGTGGATTCATCTGGGAT |
| | HLQGRSNAWRPQVN | AAAACACAATATTTTTAACCCTCCAATTATTGCTCGATACATC |
| | NPKEWLQVDFQKTM | CGTTTGCACCCAACTCATTATAGCATTCGCAGCACTCTTCGCAT |
| | KVTGVTTQGVKSLLT | GGAGTTGATGGGCTGTGATTTAAATAGTTGCAGCATGCCATTG |
| | SMYVKEFLISSSQDG | GGAATGGAGAGTAAAGCAATATCAGATGCACAGATTACTGCT |
| | HQWTLFFQNGKVKV | TCATCCTACTTTACCAATATGTTTGCCACCTGGTCTCCTTCAAA |
| | FQGNQDSFTPVVNSL | AGCTCGACTTCACCTCCAAGGGAGGAGTAATGCCTGGAGACCT |
| | DPPLLTRYLRIHPQSW | CAGGTGAATAATCCAAAAGAGTGGCTGCAAGTGGACTTCCAG |
| | VHQIALRMEVLGCEA | AAGACAATGAAAGTCACAGGAGTAACTACTCAGGGAGTAAAA |
| | QDLYGAGSPGAETAE | TCTCTGCTTACCAGCATGTATGTGAAGGAGTTCCTCATCTCCA |
| | QKLISEEDLSPATG | GCAGTCAAGATGGCCATCAGTGGACTCTCTTTTTTCAGAATGG |
| | | CAAAGTAAAGGTTTTTCAGGGAAATCAAGACTCCTTCACACCT |
| | | GTGGTGAACTCTCTAGACCCACCGTTACTGACTCGCTACCTTC |
| | | GAATTCACCCCCAGAGTTGGGTGCACCAGATTGCCCTGAGGAT |
| | | GGAGGTTCTGGGCTGCGAGGCACAGGACCTCTACGGCGCCGG |
| | | ATCACCTGGGGCCGAAACGGCCGAACAAAAACTCATCTCAGA |
| | | AGAGGATCTGTCACCTGCAACCGGTTGA |
| pBC0170 | MQIELSTCFFLCLLRF | ATGCAAATAGAGCTCTCCACCTGCTTCTTTCTGTGCCTTTTGCG |
| | CFSATRRYYLGAVEL | ATTCTGCTTTAGTGCCACCAGAAGATACTACCTGGGTGCAGTG |
| | SWDYMQSDLGELPV | GAACTGTCATGGGACTATATGCAAAGTGATCTCGGTGAGCTGC |
| | DARFPPRVPKSFPFNT | CTGTGGACGCAAGATTTCCTCCTAGAGTGCCAAAATCTTTTCC |
| | SVVYKKTLFVEFTDH | ATTCAACACCTCAGTCGTGTACAAAAAGACTCTGTTTGTAGAA |
| | LFNIAKPRPPWMGLL | TTCACGGATCACCTTTTCAACATCGCTAAGCCAAGGCCACCCT |
| | GPTIQAEVYDTVVITL | GGATGGGTCTGCTAGGTCCTACCATCCAGGCTGAGGTTTATGA |
| | KNMASHPVSLHAVG | TACAGTGGTCATTACACTTAAGAACATGGCTTCCCATCCTGTC |
| | VSYWKASEGAEYDD | AGTCTTCATGCTGTTGGTGTATCCTACTGGAAAGCTTCTGAGG |
| | QTSQREKEDDKVFPG | GAGCTGAATATGATGATCAGACCAGTCAAAGGGAGAAAGAAG |
| | GSHTYVWQVLKENG | ATGATAAAGTCTTCCCTGGTGGAAGCCATACATATGTCTGGCA |
| | PMASDPLCLTYSYLS | GGTCCTGAAAGAGAATGGTCCAATGGCCTCTGACCCACTGTGC |
| | HVDLVKDLNSGLIGA | CTTACCTACTCATATCTTTCTCATGTGGACCTGGTAAAAGACTT |
| | LLVCREGSLAKEKTQ | GAATTCAGGCCTCATTGGAGCCCTACTAGTATGTAGAGAAGGG |
| | TLHKFILLFAVFDEGK | AGTCTGGCCAAGGAAAAGACACAGACCTTGCACAAATTTATA |
| | SWHSETKNSLMQDR | CTACTTTTTGCTGTATTTGATGAAGGGAAAAGTTGGCACTCAG |
| | DAASARAWPKMHTV | AAACAAAGAACTCCTTGATGCAGGATAGGGATGCTGCATCTG |
| | NGYVNRSLPGLIGCH | CTCGGGCCTGGCCTAAAATGCACACAGTCAATGGTTATGTAAA |
| | RKSVYWHVIGMGTT | CAGGTCTCTGCCAGGTCTGATTGGATGCCACAGGAAATCAGTC |
| | PEVHSIFLEGHTFLVR | TATTGGCATGTGATTGGAATGGGCACCACTCCTGAAGTGCACT |
| | NHRQASLEISPITFLT | CAATATTCCTCGAAGGTCACACATTTCTTGTGAGGAACCATCG |
| | AQTLLMDLGQFLLFC | CCAGGCTAGCTTGGAAATCTCGCCAATAACTTTCCTTACTGCT |
| | HISSHQHDGMEAYVK | CAAACACTCTTGATGGACCTTGGACAGTTTCTACTGTTTTGTCA |
| | VDSCPEEPQLRMKNN | TATCTCTTCCCACCAACATGATGGCATGGAAGCTTATGTCAAA |
| | EEAEDYDDDLTDSEM | GTAGACAGCTGTCCAGAGGAACCCCAACTACGAATGAAAAAT |
| | DVVRFDDDNSPSFIQI | AATGAAGAAGCGGAAGACTATGATGATGATCTTACTGATTCTG |
| | RSVAKKHPKTWVHYI | AAATGGATGTGGTCAGGTTTGATGATGACAACTCTCCTTCCTT |
| | AAEEEDWDYAPLVL | TATCCAAATTCGCTCAGTTGCCAAGAAGCATCCTAAAACTTGG |
| | APDDRSYKSQYLNNG | GTACATTACATTGCTGCTGAAGAGGAGGACTGGGACTATGCTC |
| | PQRIGRKYKKVRFMA | CCTTAGTCCTCGCCCCCGATGACAGAAGTTATAAAAGTCAATA |
| | YTDETFKTREAIGAP | TTTGAACAATGGCCCTCAGCGGATTGGTAGGAAGTACAAAAA |
| | GSPAGSPTSTEEGTSE | AGTCCGATTTATGGCATACACAGATGAAACCTTTAAGACTCGT |
| | SATPESGPGSEPATSG | GAAGCTATTGGCGCGCCAGGTTCTCCTGCTGGCTCCCCCACCT |
| | SETPASSQHESGILGP | CAACAGAAGAGGGGACAAGCGAAAGCGCTACGCCTGAGAGTG |
| | LLYGEVGDTLLIIFKN | GCCCTGGCTCTGAGCCAGCCACCTCCGGCTCTGAAACCCCTGC |
| | QASRPYNIYPHGITDV | CTCGAGCCAGCATGAATCAGGAATCTTGGGACCTTTACTTTAT |
| | RPLYSRRLPKGVKHL | GGGGAAGTTGGAGACACACTGTTGATTATATTTAAGAATCAAG |
| | KDFPILPGEIFKYKWT | CAAGCAGACCATATAACATCTACCCTCACGGAATCACTGATGT |
| | VTVEDGPTKSDPRCL | CCGTCCTTTGTATTCAAGGAGATTACCAAAAGGTGTAAAACAT |
| | TRYYSSFVNMERDLA | TTGAAGGATTTTCCAATTCTGCCAGGAGAAATATTCAAATATA |
| | SGLIGPLLICYKESVD | AATGGACAGTGACTGTAGAAGATGGGCCAACTAAATCAGATC |
| | QRGNQIMSDKRNVIL | CTCGGTGCCTGACCCGCTATTACTCTAGTTTCGTTAATATGGAG |
| | FSVFDENRSWYLTEN | AGAGATCTAGCTTCAGGACTCATTGGCCCTCTCCTCATCTGCT |
| | IQRFLPNPAGVQLEDP | ACAAAGAATCTGTAGATCAAAGAGGAAACCAGATAATGTCAG |
| | EFQASNIMHSINGYVF | ACAAGAGGAATGTCATCCTGTTTTCTGTATTTGATGAGAACCG |
| | DSLQLSVCLHEVAY | AAGCTGGTACCTCACAGAGAATATACAACGCTTTCTCCCCAAT |
| | WYILSIGAQTDFLSVF | CCAGCTGGAGTGCAGCTTGAGGATCCAGAGTTCCAAGCCTCCA |
| | FSGYTFKHKMVYEDT | ACATCATGCACAGCATCAATGGCTATGTTTTTGATAGTTTGCA |
| | LTLFPFSGETVFMSM | GTTGTCAGTTTGTTTGCATGAGGTGGCATACTGGTACATTCTA |
| | ENPGLWILGCHNSDF | AGCATTGGAGCACAGACTGACTTCCTTTCTGTCTTCTTCTCTGG |
| | RNRGMTALLKVSSCD | ATATACCTTCAAACACAAAATGGTCTATGAAGACACACTCACC |
| | KNTGDYYEDSYEDIS | CTATTCCCATTCTCAGGAGAAACTGTCTTCATGTCGATGGAAA |
| | AYLLSKNNAIEPRSFS | ACCCAGGTCTATGGATTCTGGGGTGCCACAACTCAGACTTTCG |
| | QNPPVLKRHQREITR | GAACAGAGGCATGACCGCCTTACTGAAGGTTTCTAGTTGTGAC |
| | TTLQSDQEEIDYDDTI | AAGAACACTGGTGATTATTACGAGGACAGTTATGAAGATATTT |
| | SVEMKKEDFDIYDED | CAGCATACTTGCTGAGTAAAAACAATGCCATTGAACCAAGAA |
| | ENQSPRSFQKKTRHY | GCTTCTCTCAAAACCCACCAGTCTTGAAACGCCATCAACGGGA |
| | FIAAVERLWDYGMSS | AATAACTCGTACTACTCTTCAGTCAGATCAAGAGGAAATCGAT |
| | SPHVLRNRAQSGSVP | TATGATGATACCATATCAGTTGAAATGAAGAAGGAAGATTTTG |
| | QFKKVVFQEFTDGSF | ACATTTATGATGAGGATGAAAATCAGAGCCCCCGCAGCTTTCA |
| | TQPLYRGELNEHLGL | AAAGAAAACACGACACTATTTTATTGCTGCAGTGGAGAGGCTC |
| | LGPYIRAEVEDNIMV | TGGGATTATGGGATGAGTAGCTCCCCACATGTTCTAAGAAACA |
| | TFRNQASRPYSFYSSL | GGGCTCAGAGTGGCAGTGTCCCTCAGTTCAAGAAAGTTGTTTT |
| | ISYEEDQRQGAEPRK | CCAGGAATTTACTGATGGCTCCTTTACTCAGCCCTTATACCGTG |
| | NFVKPNETKTYFWK | GAGAACTAAATGAACATTTGGGACTCCTGGGGCCATATATAA |
| | VQHHMAPTKDEFDC | GAGCAGAAGTTGAAGATAATATCATGGTAACTTTCAGAAATC |
| | KAWAYFSDVDLEKD | AGGCCTCTCGTCCCTATTCCTTCTATTCTAGCCTTATTTCTTATG |
| | VHSGLIGPLLVCHTN | AGGAAGATCAGAGGCAAGGAGCAGAACCTAGAAAAAACTTTG |
| | TLNPAHGRQVTVQEF | TCAAGCCTAATGAAACCAAAACTTACTTTTGGAAAGTGCAACA |
| | ALFFTIFDETKSWYFT | TCATATGGCACCCACTAAAGATGAGTTTGACTGCAAAGCCTGG |
| | ENMERNCRAPCNIQM | GCTTATTTCTCTGATGTTGACCTGGAAAAAGATGTGCACTCAG |
| | EDPTFKENYRFHAIN | GCCTGATTGGACCCCTTCTGGTCTGCCACACTAACACACTGAA |
| | GYIMDTLPGLVMAQ | CCCTGCTCATGGGAGACAAGTGACAGTACAGGAATTTGCTCTG |
| | DQRIRWYLLSMGSNE | TTTTTCACCATCTTTGATGAGACCAAAAGCTGGTACTTCACTG |
| | NIHSIHFSGHVFTVRK | AAAATATGGAAAGAAACTGCAGGGCTCCCTGCAATATCCAGA |
| | KEEYKMALYNLYPG | TGGAAGATCCCACTTTTAAAGAGAATTATCGCTTCCATGCAAT |
| | VFETVEMLPSKAGIW | CAATGGCTACATAATGGATACACTACCTGGCTTAGTAATGGCT |
| | RVECLIGEHLHAGMS | CAGGATCAAAGGATTCGATGGTATCTGCTCAGCATGGGCAGC |
| | TLFLVYSNKCQTPLG | AATGAAAACATCCATTCTATTCATTTCAGTGGACATGTGTTCA |
| | MASGHIRDFQITASG | CTGTACGAAAAAAAGAGGAGTATAAAATGGCACTGTACAATC |
| | QYGQWAPKLARLHY | TCTATCCAGGTGTTTTTGAGACAGTGGAAATGTTACCATCCAA |
| | SGSINAWSTKEPFSWI | AGCTGGAATTTGGCGGGTGGAATGCCTTATTGGCGAGCATCTA |
| | KVDLLAPMIIHGIKTQ | CATGCTGGGATGAGCACACTTTTTCTGGTGTACAGCAATAAGT |
| | GARQKFSSLYISQFII | GTCAGACTCCCCTGGGAATGGCTTCTGGACACATTAGAGATTT |
| | MYSLDGKKWQTYRG | TCAGATTACAGCTTCAGGACAATATGGACAGTGGGCCCCAAA |
| | NSTGTLMVFFGNVDS | GCTGGCCAGACTTCATTATTCCGGATCAATCAATGCCTGGAGC |
| | SGIKHNIFNPPIIARYI | ACCAAGGAGCCCTTTTCTTGGATCAAGGTGGATCTGTTGGCAC |
| | RLHPTHYSIRSTLRME | CAATGATTATTCACGGCATCAAGACCCAGGGTGCCCGTCAGAA |
| | LMGCDLNSCSMPLG | GTTCTCCAGCCTCTACATCTCTCAGTTTATCATCATGTATAGTC |
| | MESKAISDAQITASSY | TTGATGGGAAGAAGTGGCAGACTTATCGAGGAAATTCCACTG |
| | FTNMFATWSPSKARL | GAACCTTAATGGTCTTCTTTGGCAATGTGGATTCATCTGGGAT |
| | HLQGRSNAWRPQVN | AAAACACAATATTTTTAACCCTCCAATTATTGCTCGATACATC |
| | NPKEWLQVDFQKTM | CGTTTGCACCCAACTCATTATAGCATTCGCAGCACTCTTCGCAT |
| | KVTGVTTQGVKSLLT | GGAGTTGATGGGCTGTGATTTAAATAGTTGCAGCATGCCATTG |
| | SMYVKEFLISSSQDG | GGAATGGAGAGTAAAGCAATATCAGATGCACAGATTACTGCT |
| | HQWTLFFQNGKVKV | TCATCCTACTTTACCAATATGTTTGCCACCTGGTCTCCTTCAAA |
| | FQGNQDSFTPVVNSL | AGCTCGACTTCACCTCCAAGGGAGGAGTAATGCCTGGAGACCT |
| | DPPLLTRYLRIHPQSW | CAGGTGAATAATCCAAAAGAGTGGCTGCAAGTGGACTTCCAG |
| | VHQIALRMEVLGCEA | AAGACAATGAAAGTCACAGGAGTAACTACTCAGGGAGTAAAA |
| | QDLYGAGSPGAETAE | TCTCTGCTTACCAGCATGTATGTGAAGGAGTTCCTCATCTCCA |
| | QKLISEEDLSPATG | GCAGTCAAGATGGCCATCAGTGGACTCTCTTTTTTCAGAATGG |
| | | CAAAGTAAAGGTTTTTCAGGGAAATCAAGACTCCTTCACACCT |
| | | GTGGTGAACTCTCTAGACCCACCGTTACTGACTCGCTACCTTC |
| | | GAATTCACCCCCAGAGTTGGGTGCACCAGATTGCCCTGAGGAT |
| | | GGAGGTTCTGGGCTGCGAGGCACAGGACCTCTACGGCGCCGG |
| | | ATCACCTGGGGCCGAAACGGCCGAACAAAAACTCATCTCAGA |
| | | AGAGGATCTGTCACCTGCAACCGGTTGA |
| pBC0133 | MQIELSTCFFLCLLRF | ATGCAAATAGAGCTCTCCACCTGCTTCTTTCTGTGCCTTTTGCG |
| | CFSATRRYYLGAVEL | ATTCTGCTTTAGTGCCACCAGAAGATACTACCTGGGTGCAGTG |
| | SWDYMQSDLGELPV | GAACTGTCATGGGACTATATGCAAAGTGATCTCGGTGAGCTGC |
| | DARFPPRVPKSFPFNT | CTGTGGACGCAAGATTTCCTCCTAGAGTGCCAAAATCTTTTCC |
| | SVVYKKTLFVEFTDH | ATTCAACACCTCAGTCGTGTACAAAAAGACTCTGTTTGTAGAA |
| | LFNIAKPRPPWMGLL | TTCACGGATCACCTTTTCAACATCGCTAAGCCAAGGCCACCCT |
| | GPTIQAEVYDTVVITL | GGATGGGTCTGCTAGGTCCTACCATCCAGGCTGAGGTTTATGA |
| | KNMASHPVSLHAVG | TACAGTGGTCATTACACTTAAGAACATGGCTTCCCATCCTGTC |
| | VSYWKASEGAEYDD | AGTCTTCATGCTGTTGGTGTATCCTACTGGAAAGCTTCTGAGG |
| | QTSQREKEDDKVFPG | GAGCTGAATATGATGATCAGACCAGTCAAAGGGAGAAAGAAG |
| | GSHTYVWQVLKENG | ATGATAAAGTCTTCCCTGGTGGAAGCCATACATATGTCTGGCA |
| | PMASDPLCLTYSYLS | GGTCCTGAAAGAGAATGGTCCAATGGCCTCTGACCCACTGTGC |
| | HVDLVKDLNSGLIGA | CTTACCTACTCATATCTTTCTCATGTGGACCTGGTAAAAGACTT |
| | LLVCREGSLAKEKTQ | GAATTCAGGCCTCATTGGAGCCCTACTAGTATGTAGAGAAGGG |
| | TLHKFILLFAVFDEGK | AGTCTGGCCAAGGAAAAGACACAGACCTTGCACAAATTTATA |
| | SWHSETKNSLMQDR | CTACTTTTTGCTGTATTTGATGAAGGGAAAAGTTGGCACTCAG |
| | DAASARAWPKMHTV | AAACAAAGAACTCCTTGATGCAGGATAGGGATGCTGCATCTG |
| | NGYVNRSLPGLIGCH | CTCGGGCCTGGCCTAAAATGCACACAGTCAATGGTTATGTAAA |
| | RKSVYWHVIGMGTT | CAGGTCTCTGCCAGGTCTGATTGGATGCCACAGGAAATCAGTC |
| | PEVHSIFLEGHTFLVR | TATTGGCATGTGATTGGAATGGGCACCACTCCTGAAGTGCACT |
| | NHRQASLEISPITFLT | CAATATTCCTCGAAGGTCACACATTTCTTGTGAGGAACCATCG |
| | AQTLLMDLGQFLLFC | CCAGGCTAGCTTGGAAATCTCGCCAATAACTTTCCTTACTGCT |
| | HISSHQHDGMEAYVK | CAAACACTCTTGATGGACCTTGGACAGTTTCTACTGTTTTGTCA |
| | VDSCPEEPQLRMKNN | TATCTCTTCCCACCAACATGATGGCATGGAAGCTTATGTCAAA |
| | EEAEDYDDDLTDSEM | GTAGACAGCTGTCCAGAGGAACCCCAACTACGAATGAAAAAT |
| | DVVRFDDDNSPSFIQI | AATGAAGAAGCGGAAGACTATGATGATGATCTTACTGATTCTG |
| | RSVAKKHPKTWVHYI | AAATGGATGTGGTCAGGTTTGATGATGACAACTCTCCTTCCTT |
| | AAEEEDWDYAPLVL | TATCCAAATTCGCTCAGTTGCCAAGAAGCATCCTAAAACTTGG |
| | APDDRSYKSQYLNNG | GTACATTACATTGCTGCTGAAGAGGAGGACTGGGACTATGCTC |
| | PQRIGRKYKKVRFMA | CCTTAGTCCTCGCCCCCGATGACAGAAGTTATAAAAGTCAATA |
| | YTDETFKTREAIQHES | TTTGAACAATGGCCCTCAGCGGATTGGTAGGAAGTACAAAAA |
| | GILGPLLYGEVGDTL | AGTCCGATTTATGGCATACACAGATGAAACCTTTAAGACTCGT |
| | LIIFKNQASRPYNIYP | GAAGCTATTCAGCATGAATCAGGAATCTTGGGACCTTTACTTT |
| | HGITDVRPLYSRRLPK | ATGGGGAAGTTGGAGACACACTGTTGATTATATTTAAGAATCA |
| | GAPGSPAGSPTSTEEG | AGCAAGCAGACCATATAACATCTACCCTCACGGAATCACTGAT |
| | TSESATPESGPGSEPA | GTCCGTCCTTTGTATTCAAGGAGACTCCCTAAAGGCGCGCCAG |
| | TSGSETPASSLPKGVK | GTTCTCCTGCTGGCTCCCCCACCTCAACAGAAGAGGGGACAAG |
| | HLKDFPILPGEIFKYK | CGAAAGCGCTACGCCTGAGAGTGGCCCTGGCTCTGAGCCAGC |
| | WTVTVEDGPTKSDPR | CACCTCCGGCTCTGAAACCCCTGCCTCGAGCTTACCAAAAGGT |
| | CLTRYYSSFVNMERD | GTAAAACATTTGAAGGATTTTCCAATTCTGCCAGGAGAAATAT |
| | LASGLIGPLLICYKES | TCAAATATAAATGGACAGTGACTGTAGAAGATGGGCCAACTA |
| | VDQRGNQIMSDKRN | AATCAGATCCTCGGTGCCTGACCCGCTATTACTCTAGTTTCGTT |
| | VILFSVFDENRSWYL | AATATGGAGAGAGATCTAGCTTCAGGACTCATTGGCCCTCTCC |
| | TENIQRFLPNPAGVQL | TCATCTGCTACAAAGAATCTGTAGATCAAAGAGGAAACCAGA |
| | EDPEFQASNIMHSING | TAATGTCAGACAAGAGGAATGTCATCCTGTTTTCTGTATTTGA |
| | YVFDSLQLSVCLHEV | TGAGAACCGAAGCTGGTACCTCACAGAGAATATACAACGCTTT |
| | AYWYILSIGAQTDFLS | CTCCCCAATCCAGCTGGAGTGCAGCTTGAGGATCCAGAGTTCC |
| | VFFSGYTFKHKMVYE | AAGCCTCCAACATCATGCACAGCATCAATGGCTATGTTTTTGA |
| | DTLTLFPFSGETVFMS | TAGTTTGCAGTTGTCAGTTTGTTTGCATGAGGTGGCATACTGGT |
| | MENPGLWILGCHNSD | ACATTCTAAGCATTGGAGCACAGACTGACTTCCTTTCTGTCTTC |
| | FRNRGMTALLKVSSC | TTCTCTGGATATACCTTCAAACACAAAATGGTCTATGAAGACA |
| | DKNTGDYYEDSYEDI | CACTCACCCTATTCCCATTCTCAGGAGAAACTGTCTTCATGTCG |
| | SAYLLSKNNAIEPRSF | ATGGAAAACCCAGGTCTATGGATTCTGGGGTGCCACAACTCAG |
| | SQNPPVLKRHQREITR | ACTTTCGGAACAGAGGCATGACCGCCTTACTGAAGGTTTCTAG |
| | TTLQSDQEEIDYDDTI | TTGTGACAAGAACACTGGTGATTATTACGAGGACAGTTATGAA |
| | SVEMKKEDFDIYDED | GATATTTCAGCATACTTGCTGAGTAAAAACAATGCCATTGAAC |
| | ENQSPRSFQKKTRHY | CAAGAAGCTTCTCTCAAAACCCACCAGTCTTGAAACGCCATCA |
| | FIAAVERLWDYGMSS | ACGGGAAATAACTCGTACTACTCTTCAGTCAGATCAAGAGGA |
| | SPHVLRNRAQSGSVP | AATCGATTATGATGATACCATATCAGTTGAAATGAAGAAGGA |
| | QFKKVVFQEFTDGSF | AGATTTTGACATTTATGATGAGGATGAAAATCAGAGCCCCCGC |
| | TQPLYRGELNEHLGL | AGCTTTCAAAAGAAAACACGACACTATTTTATTGCTGCAGTGG |
| | LGPYIRAEVEDNIMV | AGAGGCTCTGGGATTATGGGATGAGTAGCTCCCCACATGTTCT |
| | TFRNQASRPYSFYSSL | AAGAAACAGGGCTCAGAGTGGCAGTGTCCCTCAGTTCAAGAA |
| | ISYEEDQRQGAEPRK | AGTTGTTTTCCAGGAATTTACTGATGGCTCCTTTACTCAGCCCT |
| | NFVKPNETKTYFWK | TATACCGTGGAGAACTAAATGAACATTTGGGACTCCTGGGGCC |
| | VQHHMAPTKDEFDC | ATATATAAGAGCAGAAGTTGAAGATAATATCATGGTAACTTTC |
| | KAWAYFSDVDLEKD | AGAAATCAGGCCTCTCGTCCCTATTCCTTCTATTCTAGCCTTAT |
| | VHSGLIGPLLVCHTN | TTCTTATGAGGAAGATCAGAGGCAAGGAGCAGAACCTAGAAA |
| | TLNPAHGRQVTVQEF | AAACTTTGTCAAGCCTAATGAAACCAAAACTTACTTTTGGAAA |
| | ALFFTIFDETKSWYFT | GTGCAACATCATATGGCACCCACTAAAGATGAGTTTGACTGCA |
| | ENMERNCRAPCNIQM | AAGCCTGGGCTTATTTCTCTGATGTTGACCTGGAAAAAGATGT |
| | EDPTFKENYRFHAIN | GCACTCAGGCCTGATTGGACCCCTTCTGGTCTGCCACACTAAC |
| | GYIMDTLPGLVMAQ | ACACTGAACCCTGCTCATGGGAGACAAGTGACAGTACAGGAA |
| | DQRIRWYLLSMGSNE | TTTGCTCTGTTTTTCACCATCTTTGATGAGACCAAAAGCTGGTA |
| | NIHSIHFSGHVFTVRK | CTTCACTGAAAATATGGAAAGAAACTGCAGGGCTCCCTGCAAT |
| | KEEYKMALYNLYPG | ATCCAGATGGAAGATCCCACTTTTAAAGAGAATTATCGCTTCC |
| | VFETVEMLPSKAGIW | ATGCAATCAATGGCTACATAATGGATACACTACCTGGCTTAGT |
| | RVECLIGEHLHAGMS | AATGGCTCAGGATCAAAGGATTCGATGGTATCTGCTCAGCATG |
| | TLFLVYSNKCQTPLG | GGCAGCAATGAAAACATCCATTCTATTCATTTCAGTGGACATG |
| | MASGHIRDFQITASG | TGTTCACTGTACGAAAAAAAGAGGAGTATAAAATGGCACTGT |
| | QYGQWAPKLARLHY | ACAATCTCTATCCAGGTGTTTTTGAGACAGTGGAAATGTTACC |
| | SGSINAWSTKEPFSWI | ATCCAAAGCTGGAATTTGGCGGGTGGAATGCCTTATTGGCGAG |
| | KVDLLAPMIIHGIKTQ | CATCTACATGCTGGGATGAGCACACTTTTTCTGGTGTACAGCA |
| | GARQKFSSLYISQFII | ATAAGTGTCAGACTCCCCTGGGAATGGCTTCTGGACACATTAG |
| | MYSLDGKKWQTYRG | AGATTTTCAGATTACAGCTTCAGGACAATATGGACAGTGGGCC |
| | NSTGTLMVFFGNVDS | CCAAAGCTGGCCAGACTTCATTATTCCGGATCAATCAATGCCT |
| | SGIKHNIFNPPIIARYI | GGAGCACCAAGGAGCCCTTTTCTTGGATCAAGGTGGATCTGTT |
| | RLHPTHYSIRSTLRME | GGCACCAATGATTATTCACGGCATCAAGACCCAGGGTGCCCGT |
| | LMGCDLNSCSMPLG | CAGAAGTTCTCCAGCCTCTACATCTCTCAGTTTATCATCATGTA |
| | MESKAISDAQITASSY | TAGTCTTGATGGGAAGAAGTGGCAGACTTATCGAGGAAATTCC |
| | FTNMFATWSPSKARL | ACTGGAACCTTAATGGTCTTCTTTGGCAATGTGGATTCATCTG |
| | HLQGRSNAWRPQVN | GGATAAAACACAATATTTTTAACCCTCCAATTATTGCTCGATA |
| | NPKEWLQVDFQKTM | CATCCGTTTGCACCCAACTCATTATAGCATTCGCAGCACTCTTC |
| | KVTGVTTQGVKSLLT | GCATGGAGTTGATGGGCTGTGATTTAAATAGTTGCAGCATGCC |
| | SMYVKEFLISSSQDG | ATTGGGAATGGAGAGTAAAGCAATATCAGATGCACAGATTAC |
| | HQWTLFFQNGKVKV | TGCTTCATCCTACTTTACCAATATGTTTGCCACCTGGTCTCCTT |
| | FQGNQDSFTPVVNSL | CAAAAGCTCGACTTCACCTCCAAGGGAGGAGTAATGCCTGGA |
| | DPPLLTRYLRIHPQSW | GACCTCAGGTGAATAATCCAAAAGAGTGGCTGCAAGTGGACT |
| | VHQIALRMEVLGCEA | TCCAGAAGACAATGAAAGTCACAGGAGTAACTACTCAGGGAG |
| | QDLYGAGSPGAETAE | TAAAATCTCTGCTTACCAGCATGTATGTGAAGGAGTTCCTCAT |
| | QKLISEEDLSPATG | CTCCAGCAGTCAAGATGGCCATCAGTGGACTCTCTTTTTTCAG |
| | | AATGGCAAAGTAAAGGTTTTTCAGGGAAATCAAGACTCCTTCA |
| | | CACCTGTGGTGAACTCTCTAGACCCACCGTTACTGACTCGCTA |
| | | CCTTCGAATTCACCCCCAGAGTTGGGTGCACCAGATTGCCCTG |
| | | AGGATGGAGGTTCTGGGCTGCGAGGCACAGGACCTCTACGGC |
| | | GCCGGATCACCTGGGGCCGAAACGGCCGAACAAAAACTCATC |
| | | TCAGAAGAGGATCTGTCACCTGCAACCGGTTGA |
| pBC0171 | MQIELSTCFFLCLLRF | ATGCAAATAGAGCTCTCCACCTGCTTCTTTCTGTGCCTTTTGCG |
| | CFSATRRYYLGAVEL | ATTCTGCTTTAGTGCCACCAGAAGATACTACCTGGGTGCAGTG |
| | SWDYMQSDLGELPV | GAACTGTCATGGGACTATATGCAAAGTGATCTCGGTGAGCTGC |
| | DARFPPRVPKSFPFNT | CTGTGGACGCAAGATTTCCTCCTAGAGTGCCAAAATCTTTTCC |
| | SVVYKKTLFVEFTDH | ATTCAACACCTCAGTCGTGTACAAAAAGACTCTGTTTGTAGAA |
| | LFNIAKPRPPWMGLL | TTCACGGATCACCTTTTCAACATCGCTAAGCCAAGGCCACCCT |
| | GPTIQAEVYDTVVITL | GGATGGGTCTGCTAGGTCCTACCATCCAGGCTGAGGTTTATGA |
| | KNMASHPVSLHAVG | TACAGTGGTCATTACACTTAAGAACATGGCTTCCCATCCTGTC |
| | VSYWKASEGAEYDD | AGTCTTCATGCTGTTGGTGTATCCTACTGGAAAGCTTCTGAGG |
| | QTSQREKEDDKVFPG | GAGCTGAATATGATGATCAGACCAGTCAAAGGGAGAAAGAAG |
| | GSHTYVWQVLKENG | ATGATAAAGTCTTCCCTGGTGGAAGCCATACATATGTCTGGCA |
| | PMASDPLCLTYSYLS | GGTCCTGAAAGAGAATGGTCCAATGGCCTCTGACCCACTGTGC |
| | HVDLVKDLNSGLIGA | CTTACCTACTCATATCTTTCTCATGTGGACCTGGTAAAAGACTT |
| | LLVCREGSLAKEKTQ | GAATTCAGGCCTCATTGGAGCCCTACTAGTATGTAGAGAAGGG |
| | TLHKFILLFAVFDEGK | AGTCTGGCCAAGGAAAAGACACAGACCTTGCACAAATTTATA |
| | SWHSETKNSLMQDR | CTACTTTTTGCTGTATTTGATGAAGGGAAAAGTTGGCACTCAG |
| | DAASARAWPKMHTV | AAACAAAGAACTCCTTGATGCAGGATAGGGATGCTGCATCTG |
| | NGYVNRSLPGLIGCH | CTCGGGCCTGGCCTAAAATGCACACAGTCAATGGTTATGTAAA |
| | RKSVYWHVIGMGTT | CAGGTCTCTGCCAGGTCTGATTGGATGCCACAGGAAATCAGTC |
| | PEVHSIFLEGHTFLVR | TATTGGCATGTGATTGGAATGGGCACCACTCCTGAAGTGCACT |
| | NHRQASLEISPITFLT | CAATATTCCTCGAAGGTCACACATTTCTTGTGAGGAACCATCG |
| | AQTLLMDLGQFLLFC | CCAGGCTAGCTTGGAAATCTCGCCAATAACTTTCCTTACTGCT |
| | HISSHQHDGMEAYVK | CAAACACTCTTGATGGACCTTGGACAGTTTCTACTGTTTTGTCA |
| | VDSCPEEPQLRMKNN | TATCTCTTCCCACCAACATGATGGCATGGAAGCTTATGTCAAA |
| | EEAEDYDDDLTDSEM | GTAGACAGCTGTCCAGAGGAACCCCAACTACGAATGAAAAAT |
| | DVVRFDDDNSPSFIQI | AATGAAGAAGCGGAAGACTATGATGATGATCTTACTGATTCTG |
| | RSVAKKHPKTWVHYI | AAATGGATGTGGTCAGGTTTGATGATGACAACTCTCCTTCCTT |
| | AAEEEDWDYAPLVL | TATCCAAATTCGCTCAGTTGCCAAGAAGCATCCTAAAACTTGG |
| | APDDRSYKSQYLNNG | GTACATTACATTGCTGCTGAAGAGGAGGACTGGGACTATGCTC |
| | PQRIGRKYKKVRFMA | CCTTAGTCCTCGCCCCCGATGACAGAAGTTATAAAAGTCAATA |
| | YTDETFKTREAIQHES | TTTGAACAATGGCCCTCAGCGGATTGGTAGGAAGTACAAAAA |
| | GILGPLLYGEVGDTL | AGTCCGATTTATGGCATACACAGATGAAACCTTTAAGACTCGT |
| | LIIFKNQASRPYNIYP | GAAGCTATTCAGCATGAATCAGGAATCTTGGGACCTTTACTTT |
| | HGITDVRPLYSRRLPK | ATGGGGAAGTTGGAGACACACTGTTGATTATATTTAAGAATCA |
| | GVKHLKDFPILPGEIF | AGCAAGCAGACCATATAACATCTACCCTCACGGAATCACTGAT |
| | KYKWTVTVEGAPGS | GTCCGTCCTTTGTATTCAAGGAGATTACCAAAAGGTGTAAAAC |
| | PAGSPTSTEEGTSESA | ATTTGAAGGATTTTCCAATTCTGCCAGGAGAAATATTCAAATA |
| | TPESGPGSEPATSGSE | TAAATGGACAGTGACTGTAGAAGGCGCGCCAGGTTCTCCTGCT |
| | TPASSDGPTKSDPRCL | GGCTCCCCCACCTCAACAGAAGAGGGGACAAGCGAAAGCGCT |
| | TRYYSSFVNMERDLA | ACGCCTGAGAGTGGCCCTGGCTCTGAGCCAGCCACCTCCGGCT |
| | SGLIGPLLICYKESVD | CTGAAACCCCTGCCTCGAGCGATGGGCCAACTAAATCAGATCC |
| | QRGNQIMSDKRNVIL | TCGGTGCCTGACCCGCTATTACTCTAGTTTCGTTAATATGGAG |
| | FSVFDENRSWYLTEN | AGAGATCTAGCTTCAGGACTCATTGGCCCTCTCCTCATCTGCT |
| | IQRFLPNPAGVQLEDP | ACAAAGAATCTGTAGATCAAAGAGGAAACCAGATAATGTCAG |
| | EFQASNIMHSINGYVF | ACAAGAGGAATGTCATCCTGTTTTCTGTATTTGATGAGAACCG |
| | DSLQLSVCLHEVAY | AAGCTGGTACCTCACAGAGAATATACAACGCTTTCTCCCCAAT |
| | WYILSIGAQTDFLSVF | CCAGCTGGAGTGCAGCTTGAGGATCCAGAGTTCCAAGCCTCCA |
| | FSGYTFKHKMVYEDT | ACATCATGCACAGCATCAATGGCTATGTTTTTGATAGTTTGCA |
| | LTLFPFSGETVFMSM | GTTGTCAGTTTGTTTGCATGAGGTGGCATACTGGTACATTCTA |
| | ENPGLWILGCHNSDF | AGCATTGGAGCACAGACTGACTTCCTTTCTGTCTTCTTCTCTGG |
| | RNRGMTALLKVSSCD | ATATACCTTCAAACACAAAATGGTCTATGAAGACACACTCACC |
| | KNTGDYYEDSYEDIS | CTATTCCCATTCTCAGGAGAAACTGTCTTCATGTCGATGGAAA |
| | AYLLSKNNAIEPRSFS | ACCCAGGTCTATGGATTCTGGGGTGCCACAACTCAGACTTTCG |
| | QNPPVLKRHQREITR | GAACAGAGGCATGACCGCCTTACTGAAGGTTTCTAGTTGTGAC |
| | TTLQSDQEEIDYDDTI | AAGAACACTGGTGATTATTACGAGGACAGTTATGAAGATATTT |
| | SVEMKKEDFDIYDED | CAGCATACTTGCTGAGTAAAAACAATGCCATTGAACCAAGAA |
| | ENQSPRSFQKKTRHY | GCTTCTCTCAAAACCCACCAGTCTTGAAACGCCATCAACGGGA |
| | FIAAVERLWDYGMSS | AATAACTCGTACTACTCTTCAGTCAGATCAAGAGGAAATCGAT |
| | SPHVLRNRAQSGSVP | TATGATGATACCATATCAGTTGAAATGAAGAAGGAAGATTTTG |
| | QFKKVVFQEFTDGSF | ACATTTATGATGAGGATGAAAATCAGAGCCCCCGCAGCTTTCA |
| | TQPLYRGELNEHLGL | AAAGAAAACACGACACTATTTTATTGCTGCAGTGGAGAGGCTC |
| | LGPYIRAEVEDNIMV | TGGGATTATGGGATGAGTAGCTCCCCACATGTTCTAAGAAACA |
| | TFRNQASRPYSFYSSL | GGGCTCAGAGTGGCAGTGTCCCTCAGTTCAAGAAAGTTGTTTT |
| | ISYEEDQRQGAEPRK | CCAGGAATTTACTGATGGCTCCTTTACTCAGCCCTTATACCGTG |
| | NFVKPNETKTYFWK | GAGAACTAAATGAACATTTGGGACTCCTGGGGCCATATATAA |
| | VQHHMAPTKDEFDC | GAGCAGAAGTTGAAGATAATATCATGGTAACTTTCAGAAATC |
| | KAWAYFSDVDLEKD | AGGCCTCTCGTCCCTATTCCTTCTATTCTAGCCTTATTTCTTATG |
| | VHSGLIGPLLVCHTN | AGGAAGATCAGAGGCAAGGAGCAGAACCTAGAAAAAACTTTG |
| | TLNPAHGRQVTVQEF | TCAAGCCTAATGAAACCAAAACTTACTTTTGGAAAGTGCAACA |
| | ALFFTIFDETKSWYFT | TCATATGGCACCCACTAAAGATGAGTTTGACTGCAAAGCCTGG |
| | ENMERNCRAPCNIQM | GCTTATTTCTCTGATGTTGACCTGGAAAAAGATGTGCACTCAG |
| | EDPTFKENYRFHAIN | GCCTGATTGGACCCCTTCTGGTCTGCCACACTAACACACTGAA |
| | GYIMDTLPGLVMAQ | CCCTGCTCATGGGAGACAAGTGACAGTACAGGAATTTGCTCTG |
| | DQRIRWYLLSMGSNE | TTTTTCACCATCTTTGATGAGACCAAAAGCTGGTACTTCACTG |
| | NIHSIHFSGHVFTVRK | AAAATATGGAAAGAAACTGCAGGGCTCCCTGCAATATCCAGA |
| | KEEYKMALYNLYPG | TGGAAGATCCCACTTTTAAAGAGAATTATCGCTTCCATGCAAT |
| | VFETVEMLPSKAGIW | CAATGGCTACATAATGGATACACTACCTGGCTTAGTAATGGCT |
| | RVECLIGEHLHAGMS | CAGGATCAAAGGATTCGATGGTATCTGCTCAGCATGGGCAGC |
| | TLFLVYSNKCQTPLG | AATGAAAACATCCATTCTATTCATTTCAGTGGACATGTGTTCA |
| | MASGHIRDFQITASG | CTGTACGAAAAAAAGAGGAGTATAAAATGGCACTGTACAATC |
| | QYGQWAPKLARLHY | TCTATCCAGGTGTTTTTGAGACAGTGGAAATGTTACCATCCAA |
| | SGSINAWSTKEPFSWI | AGCTGGAATTTGGCGGGTGGAATGCCTTATTGGCGAGCATCTA |
| | KVDLLAPMIIHGIKTQ | CATGCTGGGATGAGCACACTTTTTCTGGTGTACAGCAATAAGT |
| | GARQKFSSLYISQFII | GTCAGACTCCCCTGGGAATGGCTTCTGGACACATTAGAGATTT |
| | MYSLDGKKWQTYRG | TCAGATTACAGCTTCAGGACAATATGGACAGTGGGCCCCAAA |
| | NSTGTLMVFFGNVDS | GCTGGCCAGACTTCATTATTCCGGATCAATCAATGCCTGGAGC |
| | SGIKHNIFNPPIIARYI | ACCAAGGAGCCCTTTTCTTGGATCAAGGTGGATCTGTTGGCAC |
| | RLHPTHYSIRSTLRME | CAATGATTATTCACGGCATCAAGACCCAGGGTGCCCGTCAGAA |
| | LMGCDLNSCSMPLG | GTTCTCCAGCCTCTACATCTCTCAGTTTATCATCATGTATAGTC |
| | MESKAISDAQITASSY | TTGATGGGAAGAAGTGGCAGACTTATCGAGGAAATTCCACTG |
| | FTNMFATWSPSKARL | GAACCTTAATGGTCTTCTTTGGCAATGTGGATTCATCTGGGAT |
| | HLQGRSNAWRPQVN | AAAACACAATATTTTTAACCCTCCAATTATTGCTCGATACATC |
| | NPKEWLQVDFQKTM | CGTTTGCACCCAACTCATTATAGCATTCGCAGCACTCTTCGCAT |
| | KVTGVTTQGVKSLLT | GGAGTTGATGGGCTGTGATTTAAATAGTTGCAGCATGCCATTG |
| | SMYVKEFLISSSQDG | GGAATGGAGAGTAAAGCAATATCAGATGCACAGATTACTGCT |
| | HQWTLFFQNGKVKV | TCATCCTACTTTACCAATATGTTTGCCACCTGGTCTCCTTCAAA |
| | FQGNQDSFTPVVNSL | AGCTCGACTTCACCTCCAAGGGAGGAGTAATGCCTGGAGACCT |
| | DPPLLTRYLRIHPQSW | CAGGTGAATAATCCAAAAGAGTGGCTGCAAGTGGACTTCCAG |
| | VHQIALRMEVLGCEA | AAGACAATGAAAGTCACAGGAGTAACTACTCAGGGAGTAAAA |
| | QDLYGAGSPGAETAE | TCTCTGCTTACCAGCATGTATGTGAAGGAGTTCCTCATCTCCA |
| | QKLISEEDLSPATG | GCAGTCAAGATGGCCATCAGTGGACTCTCTTTTTTCAGAATGG |
| | | CAAAGTAAAGGTTTTTCAGGGAAATCAAGACTCCTTCACACCT |
| | | GTGGTGAACTCTCTAGACCCACCGTTACTGACTCGCTACCTTC |
| | | GAATTCACCCCCAGAGTTGGGTGCACCAGATTGCCCTGAGGAT |
| | | GGAGGTTCTGGGCTGCGAGGCACAGGACCTCTACGGCGCCGG |
| | | ATCACCTGGGGCCGAAACGGCCGAACAAAAACTCATCTCAGA |
| | | AGAGGATCTGTCACCTGCAACCGGTTGA |
| pBC0134 | MQIELSTCFFLCLLRF | ATGCAAATAGAGCTCTCCACCTGCTTCTTTCTGTGCCTTTTGCG |
| | CFSATRRYYLGAVEL | ATTCTGCTTTAGTGCCACCAGAAGATACTACCTGGGTGCAGTG |
| | SWDYMQSDLGELPV | GAACTGTCATGGGACTATATGCAAAGTGATCTCGGTGAGCTGC |
| | DARFPPRVPKSFPFNT | CTGTGGACGCAAGATTTCCTCCTAGAGTGCCAAAATCTTTTCC |
| | SVVYKKTLFVEFTDH | ATTCAACACCTCAGTCGTGTACAAAAAGACTCTGTTTGTAGAA |
| | LFNIAKPRPPWMGLL | TTCACGGATCACCTTTTCAACATCGCTAAGCCAAGGCCACCCT |
| | GPTIQAEVYDTVVITL | GGATGGGTCTGCTAGGTCCTACCATCCAGGCTGAGGTTTATGA |
| | KNMASHPVSLHAVG | TACAGTGGTCATTACACTTAAGAACATGGCTTCCCATCCTGTC |
| | VSYWKASEGAEYDD | AGTCTTCATGCTGTTGGTGTATCCTACTGGAAAGCTTCTGAGG |
| | QTSQREKEDDKVFPG | GAGCTGAATATGATGATCAGACCAGTCAAAGGGAGAAAGAAG |
| | GSHTYVWQVLKENG | ATGATAAAGTCTTCCCTGGTGGAAGCCATACATATGTCTGGCA |
| | PMASDPLCLTYSYLS | GGTCCTGAAAGAGAATGGTCCAATGGCCTCTGACCCACTGTGC |
| | HVDLVKDLNSGLIGA | CTTACCTACTCATATCTTTCTCATGTGGACCTGGTAAAAGACTT |
| | LLVCREGSLAKEKTQ | GAATTCAGGCCTCATTGGAGCCCTACTAGTATGTAGAGAAGGG |
| | TLHKFILLFAVFDEGK | AGTCTGGCCAAGGAAAAGACACAGACCTTGCACAAATTTATA |
| | SWHSETKNSLMQDR | CTACTTTTTGCTGTATTTGATGAAGGGAAAAGTTGGCACTCAG |
| | DAASARAWPKMHTV | AAACAAAGAACTCCTTGATGCAGGATAGGGATGCTGCATCTG |
| | NGYVNRSLPGLIGCH | CTCGGGCCTGGCCTAAAATGCACACAGTCAATGGTTATGTAAA |
| | RKSVYWHVIGMGTT | CAGGTCTCTGCCAGGTCTGATTGGATGCCACAGGAAATCAGTC |
| | PEVHSIFLEGHTFLVR | TATTGGCATGTGATTGGAATGGGCACCACTCCTGAAGTGCACT |
| | NHRQASLEISPITFLT | CAATATTCCTCGAAGGTCACACATTTCTTGTGAGGAACCATCG |
| | AQTLLMDLGQFLLFC | CCAGGCTAGCTTGGAAATCTCGCCAATAACTTTCCTTACTGCT |
| | HISSHQHDGMEAYVK | CAAACACTCTTGATGGACCTTGGACAGTTTCTACTGTTTTGTCA |
| | VDSCPEEPQLRMKNN | TATCTCTTCCCACCAACATGATGGCATGGAAGCTTATGTCAAA |
| | EEAEDYDDDLTDSEM | GTAGACAGCTGTCCAGAGGAACCCCAACTACGAATGAAAAAT |
| | DVVRFDDDNSPSFIQI | AATGAAGAAGCGGAAGACTATGATGATGATCTTACTGATTCTG |
| | RSVAKKHPKTWVHYI | AAATGGATGTGGTCAGGTTTGATGATGACAACTCTCCTTCCTT |
| | AAEEEDWDYAPLVL | TATCCAAATTCGCTCAGTTGCCAAGAAGCATCCTAAAACTTGG |
| | APDDRSYKSQYLNNG | GTACATTACATTGCTGCTGAAGAGGAGGACTGGGACTATGCTC |
| | PQRIGRKYKKVRFMA | CCTTAGTCCTCGCCCCCGATGACAGAAGTTATAAAAGTCAATA |
| | YTDETFKTREAIQHES | TTTGAACAATGGCCCTCAGCGGATTGGTAGGAAGTACAAAAA |
| | GILGPLLYGEVGDTL | AGTCCGATTTATGGCATACACAGATGAAACCTTTAAGACTCGT |
| | LIIFKNQASRPYNIYP | GAAGCTATTCAGCATGAATCAGGAATCTTGGGACCTTTACTTT |
| | HGITDVRPLYSRRLPK | ATGGGGAAGTTGGAGACACACTGTTGATTATATTTAAGAATCA |
| | GVKHLKDFPILPGEIF | AGCAAGCAGACCATATAACATCTACCCTCACGGAATCACTGAT |
| | KYKWTVTVEDGPTK | GTCCGTCCTTTGTATTCAAGGAGATTACCAAAAGGTGTAAAAC |
| | SDPRCLTRYYSSFVN | ATTTGAAGGATTTTCCAATTCTGCCAGGAGAAATATTCAAATA |
| | MERDLASGLIGPLLIC | TAAATGGACAGTGACTGTAGAAGATGGGCCAACTAAATCAGA |
| | YKESVDQRGNQIMSD | TCCTCGGTGCCTGACCCGCTATTACTCTAGTTTCGTTAATATGG |
| | KRNVILFSVFDENRS | AGAGAGATCTAGCTTCAGGACTCATTGGCCCTCTCCTCATCTG |
| | WYLTENIQRFLPNPA | CTACAAAGAATCTGTAGATCAAAGAGGAAACCAGATAATGTC |
| | GAPGSPAGSPTSTEEG | AGACAAGAGGAATGTCATCCTGTTTTCTGTATTTGATGAGAAC |
| | TSESATPESGPGSEPA | CGAAGCTGGTACCTCACAGAGAATATACAACGCTTTCTCCCCA |
| | TSGSETPASSGVQLED | ATCCAGCTGGCGCGCCAGGTTCTCCTGCTGGCTCCCCCACCTC |
| | PEFQASNIMHSINGYV | AACAGAAGAGGGGACAAGCGAAAGCGCTACGCCTGAGAGTG |
| | FDSLQLSVCLHEVAY | GCCCTGGCTCTGAGCCAGCCACCTCCGGCTCTGAAACCCCTGC |
| | WYILSIGAQTDFLSVF | CTCGAGCGGAGTGCAGCTTGAGGATCCAGAGTTCCAAGCCTCC |
| | FSGYTFKHKMVYEDT | AACATCATGCACAGCATCAATGGCTATGTTTTTGATAGTTTGC |
| | LTLFPFSGETVFMSM | AGTTGTCAGTTTGTTTGCATGAGGTGGCATACTGGTACATTCT |
| | ENPGLWILGCHNSDF | AAGCATTGGAGCACAGACTGACTTCCTTTCTGTCTTCTTCTCTG |
| | RNRGMTALLKVSSCD | GATATACCTTCAAACACAAAATGGTCTATGAAGACACACTCAC |
| | KNTGDYYEDSYEDIS | CCTATTCCCATTCTCAGGAGAAACTGTCTTCATGTCGATGGAA |
| | AYLLSKNNAIEPRSFS | AACCCAGGTCTATGGATTCTGGGGTGCCACAACTCAGACTTTC |
| | QNPPVLKRHQREITR | GGAACAGAGGCATGACCGCCTTACTGAAGGTTTCTAGTTGTGA |
| | TTLQSDQEEIDYDDTI | CAAGAACACTGGTGATTATTACGAGGACAGTTATGAAGATATT |
| | SVEMKKEDFDIYDED | TCAGCATACTTGCTGAGTAAAAACAATGCCATTGAACCAAGA |
| | ENQSPRSFQKKTRHY | AGCTTCTCTCAAAACCCACCAGTCTTGAAACGCCATCAACGGG |
| | FIAAVERLWDYGMSS | AAATAACTCGTACTACTCTTCAGTCAGATCAAGAGGAAATCGA |
| | SPHVLRNRAQSGSVP | TTATGATGATACCATATCAGTTGAAATGAAGAAGGAAGATTTT |
| | QFKKVVFQEFTDGSF | GACATTTATGATGAGGATGAAAATCAGAGCCCCCGCAGCTTTC |
| | TQPLYRGELNEHLGL | AAAAGAAAACACGACACTATTTTATTGCTGCAGTGGAGAGGC |
| | LGPYIRAEVEDNIMV | TCTGGGATTATGGGATGAGTAGCTCCCCACATGTTCTAAGAAA |
| | TFRNQASRPYSFYSSL | CAGGGCTCAGAGTGGCAGTGTCCCTCAGTTCAAGAAAGTTGTT |
| | ISYEEDQRQGAEPRK | TTCCAGGAATTTACTGATGGCTCCTTTACTCAGCCCTTATACCG |
| | NFVKPNETKTYFWK | TGGAGAACTAAATGAACATTTGGGACTCCTGGGGCCATATATA |
| | VQHHMAPTKDEFDC | AGAGCAGAAGTTGAAGATAATATCATGGTAACTTTCAGAAAT |
| | KAWAYFSDVDLEKD | CAGGCCTCTCGTCCCTATTCCTTCTATTCTAGCCTTATTTCTTAT |
| | VHSGLIGPLLVCHTN | GAGGAAGATCAGAGGCAAGGAGCAGAACCTAGAAAAAACTTT |
| | TLNPAHGRQVTVQEF | GTCAAGCCTAATGAAACCAAAACTTACTTTTGGAAAGTGCAAC |
| | ALFFTIFDETKSWYFT | ATCATATGGCACCCACTAAAGATGAGTTTGACTGCAAAGCCTG |
| | ENMERNCRAPCNIQM | GGCTTATTTCTCTGATGTTGACCTGGAAAAAGATGTGCACTCA |
| | EDPTFKENYRFHAIN | GGCCTGATTGGACCCCTTCTGGTCTGCCACACTAACACACTGA |
| | GYIMDTLPGLVMAQ | ACCCTGCTCATGGGAGACAAGTGACAGTACAGGAATTTGCTCT |
| | DQRIRWYLLSMGSNE | GTTTTTCACCATCTTTGATGAGACCAAAAGCTGGTACTTCACT |
| | NIHSIHFSGHVFTVRK | GAAAATATGGAAAGAAACTGCAGGGCTCCCTGCAATATCCAG |
| | KEEYKMALYNLYPG | ATGGAAGATCCCACTTTTAAAGAGAATTATCGCTTCCATGCAA |
| | VFETVEMLPSKAGIW | TCAATGGCTACATAATGGATACACTACCTGGCTTAGTAATGGC |
| | RVECLIGEHLHAGMS | TCAGGATCAAAGGATTCGATGGTATCTGCTCAGCATGGGCAGC |
| | TLFLVYSNKCQTPLG | AATGAAAACATCCATTCTATTCATTTCAGTGGACATGTGTTCA |
| | MASGHIRDFQITASG | CTGTACGAAAAAAAGAGGAGTATAAAATGGCACTGTACAATC |
| | QYGQWAPKLARLHY | TCTATCCAGGTGTTTTTGAGACAGTGGAAATGTTACCATCCAA |
| | SGSINAWSTKEPFSWI | AGCTGGAATTTGGCGGGTGGAATGCCTTATTGGCGAGCATCTA |
| | KVDLLAPMIIHGIKTQ | CATGCTGGGATGAGCACACTTTTTCTGGTGTACAGCAATAAGT |
| | GARQKFSSLYISQFII | GTCAGACTCCCCTGGGAATGGCTTCTGGACACATTAGAGATTT |
| | MYSLDGKKWQTYRG | TCAGATTACAGCTTCAGGACAATATGGACAGTGGGCCCCAAA |
| | NSTGTLMVFFGNVDS | GCTGGCCAGACTTCATTATTCCGGATCAATCAATGCCTGGAGC |
| | SGIKHNIFNPPIIARYI | ACCAAGGAGCCCTTTTCTTGGATCAAGGTGGATCTGTTGGCAC |
| | RLHPTHYSIRSTLRME | CAATGATTATTCACGGCATCAAGACCCAGGGTGCCCGTCAGAA |
| | LMGCDLNSCSMPLG | GTTCTCCAGCCTCTACATCTCTCAGTTTATCATCATGTATAGTC |
| | MESKAISDAQITASSY | TTGATGGGAAGAAGTGGCAGACTTATCGAGGAAATTCCACTG |
| | FTNMFATWSPSKARL | GAACCTTAATGGTCTTCTTTGGCAATGTGGATTCATCTGGGAT |
| | HLQGRSNAWRPQVN | AAAACACAATATTTTTAACCCTCCAATTATTGCTCGATACATC |
| | NPKEWLQVDFQKTM | CGTTTGCACCCAACTCATTATAGCATTCGCAGCACTCTTCGCAT |
| | KVTGVTTQGVKSLLT | GGAGTTGATGGGCTGTGATTTAAATAGTTGCAGCATGCCATTG |
| | SMYVKEFLISSSQDG | GGAATGGAGAGTAAAGCAATATCAGATGCACAGATTACTGCT |
| | HQWTLFFQNGKVKV | TCATCCTACTTTACCAATATGTTTGCCACCTGGTCTCCTTCAAA |
| | FQGNQDSFTPVVNSL | AGCTCGACTTCACCTCCAAGGGAGGAGTAATGCCTGGAGACCT |
| | DPPLLTRYLRIHPQSW | CAGGTGAATAATCCAAAAGAGTGGCTGCAAGTGGACTTCCAG |
| | VHQIALRMEVLGCEA | AAGACAATGAAAGTCACAGGAGTAACTACTCAGGGAGTAAAA |
| | QDLYGAGSPGAETAE | TCTCTGCTTACCAGCATGTATGTGAAGGAGTTCCTCATCTCCA |
| | QKLISEEDLSPATG | GCAGTCAAGATGGCCATCAGTGGACTCTCTTTTTTCAGAATGG |
| | | CAAAGTAAAGGTTTTTCAGGGAAATCAAGACTCCTTCACACCT |
| | | GTGGTGAACTCTCTAGACCCACCGTTACTGACTCGCTACCTTC |
| | | GAATTCACCCCCAGAGTTGGGTGCACCAGATTGCCCTGAGGAT |
| | | GGAGGTTCTGGGCTGCGAGGCACAGGACCTCTACGGCGCCGG |
| | | ATCACCTGGGGCCGAAACGGCCGAACAAAAACTCATCTCAGA |
| | | AGAGGATCTGTCACCTGCAACCGGTTGA |
| pBC0172 | MQIELSTCFFLCLLRF | ATGCAAATAGAGCTCTCCACCTGCTTCTTTCTGTGCCTTTTGCG |
| | CFSATRRYYLGAVEL | ATTCTGCTTTAGTGCCACCAGAAGATACTACCTGGGTGCAGTG |
| | SWDYMQSDLGELPV | GAACTGTCATGGGACTATATGCAAAGTGATCTCGGTGAGCTGC |
| | DARFPPRVPKSFPFNT | CTGTGGACGCAAGATTTCCTCCTAGAGTGCCAAAATCTTTTCC |
| | SVVYKKTLFVEFTDH | ATTCAACACCTCAGTCGTGTACAAAAAGACTCTGTTTGTAGAA |
| | LFNIAKPRPPWMGLL | TTCACGGATCACCTTTTCAACATCGCTAAGCCAAGGCCACCCT |
| | GPTIQAEVYDTVVITL | GGATGGGTCTGCTAGGTCCTACCATCCAGGCTGAGGTTTATGA |
| | KNMASHPVSLHAVG | TACAGTGGTCATTACACTTAAGAACATGGCTTCCCATCCTGTC |
| | VSYWKASEGAEYDD | AGTCTTCATGCTGTTGGTGTATCCTACTGGAAAGCTTCTGAGG |
| | QTSQREKEDDKVFPG | GAGCTGAATATGATGATCAGACCAGTCAAAGGGAGAAAGAAG |
| | GSHTYVWQVLKENG | ATGATAAAGTCTTCCCTGGTGGAAGCCATACATATGTCTGGCA |
| | PMASDPLCLTYSYLS | GGTCCTGAAAGAGAATGGTCCAATGGCCTCTGACCCACTGTGC |
| | HVDLVKDLNSGLIGA | CTTACCTACTCATATCTTTCTCATGTGGACCTGGTAAAAGACTT |
| | LLVCREGSLAKEKTQ | GAATTCAGGCCTCATTGGAGCCCTACTAGTATGTAGAGAAGGG |
| | TLHKFILLFAVFDEGK | AGTCTGGCCAAGGAAAAGACACAGACCTTGCACAAATTTATA |
| | SWHSETKNSLMQDR | CTACTTTTTGCTGTATTTGATGAAGGGAAAAGTTGGCACTCAG |
| | DAASARAWPKMHTV | AAACAAAGAACTCCTTGATGCAGGATAGGGATGCTGCATCTG |
| | NGYVNRSLPGLIGCH | CTCGGGCCTGGCCTAAAATGCACACAGTCAATGGTTATGTAAA |
| | RKSVYWHVIGMGTT | CAGGTCTCTGCCAGGTCTGATTGGATGCCACAGGAAATCAGTC |
| | PEVHSIFLEGHTFLVR | TATTGGCATGTGATTGGAATGGGCACCACTCCTGAAGTGCACT |
| | NHRQASLEISPITFLT | CAATATTCCTCGAAGGTCACACATTTCTTGTGAGGAACCATCG |
| | AQTLLMDLGQFLLFC | CCAGGCTAGCTTGGAAATCTCGCCAATAACTTTCCTTACTGCT |
| | HISSHQHDGMEAYVK | CAAACACTCTTGATGGACCTTGGACAGTTTCTACTGTTTTGTCA |
| | VDSCPEEPQLRMKNN | TATCTCTTCCCACCAACATGATGGCATGGAAGCTTATGTCAAA |
| | EEAEDYDDDLTDSEM | GTAGACAGCTGTCCAGAGGAACCCCAACTACGAATGAAAAAT |
| | DVVRFDDDNSPSFIQI | AATGAAGAAGCGGAAGACTATGATGATGATCTTACTGATTCTG |
| | RSVAKKHPKTWVHYI | AAATGGATGTGGTCAGGTTTGATGATGACAACTCTCCTTCCTT |
| | AAEEEDWDYAPLVL | TATCCAAATTCGCTCAGTTGCCAAGAAGCATCCTAAAACTTGG |
| | APDDRSYKSQYLNNG | GTACATTACATTGCTGCTGAAGAGGAGGACTGGGACTATGCTC |
| | PQRIGRKYKKVRFMA | CCTTAGTCCTCGCCCCCGATGACAGAAGTTATAAAAGTCAATA |
| | YTDETFKTREAIQHES | TTTGAACAATGGCCCTCAGCGGATTGGTAGGAAGTACAAAAA |
| | GILGPLLYGEVGDTL | AGTCCGATTTATGGCATACACAGATGAAACCTTTAAGACTCGT |
| | LIIFKNQASRPYNIYP | GAAGCTATTCAGCATGAATCAGGAATCTTGGGACCTTTACTTT |
| | HGITDVRPLYSRRLPK | ATGGGGAAGTTGGAGACACACTGTTGATTATATTTAAGAATCA |
| | GVKHLKDFPILPGEIF | AGCAAGCAGACCATATAACATCTACCCTCACGGAATCACTGAT |
| | KYKWTVTVEDGPTK | GTCCGTCCTTTGTATTCAAGGAGATTACCAAAAGGTGTAAAAC |
| | SDPRCLTRYYSSFVN | ATTTGAAGGATTTTCCAATTCTGCCAGGAGAAATATTCAAATA |
| | MERDLASGLIGPLLIC | TAAATGGACAGTGACTGTAGAAGATGGGCCAACTAAATCAGA |
| | YKESVDQRGNQIMSD | TCCTCGGTGCCTGACCCGCTATTACTCTAGTTTCGTTAATATGG |
| | KRNVILFSVFDENRS | AGAGAGATCTAGCTTCAGGACTCATTGGCCCTCTCCTCATCTG |
| | WYLTENIQRFLPNPA | CTACAAAGAATCTGTAGATCAAAGAGGAAACCAGATAATGTC |
| | GVQLEDPEFQASNIM | AGACAAGAGGAATGTCATCCTGTTTTCTGTATTTGATGAGAAC |
| | HSINGYVFDSLQLSV | CGAAGCTGGTACCTCACAGAGAATATACAACGCTTTCTCCCCA |
| | CLHEVAYWYILSIGA | ATCCAGCTGGAGTGCAGCTTGAGGATCCAGAGTTCCAAGCCTC |
| | QTDFLSVFFSGYTFK | CAACATCATGCACAGCATCAATGGCTATGTTTTTGATAGTTTG |
| | HKMVYEDTLTLFPFS | CAGTTGTCAGTTTGTTTGCATGAGGTGGCATACTGGTACATTCT |
| | GETVFMSMENPGLWI | AAGCATTGGAGCACAGACTGACTTCCTTTCTGTCTTCTTCTCTG |
| | LGCHNSDFRNRGMT | GATATACCTTCAAACACAAAATGGTCTATGAAGACACACTCAC |
| | ALLKVSSCDKGAPGS | CCTATTCCCATTCTCAGGAGAAACTGTCTTCATGTCGATGGAA |
| | PAGSPTSTEEGTSESA | AACCCAGGTCTATGGATTCTGGGGTGCCACAACTCAGACTTTC |
| | TPESGPGSEPATSGSE | GGAACAGAGGCATGACCGCCTTACTGAAGGTTTCTAGTTGTGA |
| | TPASSNTGDYYEDSY | CAAGGGCGCGCCAGGTTCTCCTGCTGGCTCCCCCACCTCAACA |
| | EDISAYLLSKNNAIEP | GAAGAGGGGACAAGCGAAAGCGCTACGCCTGAGAGTGGCCCT |
| | RSFSQNPPVLKRHQR | GGCTCTGAGCCAGCCACCTCCGGCTCTGAAACCCCTGCCTCGA |
| | EITRTTLQSDQEEIDY | GCAACACTGGTGATTATTACGAGGACAGTTATGAAGATATTTC |
| | DDTISVEMKKEDFDI | AGCATACTTGCTGAGTAAAAACAATGCCATTGAACCAAGAAG |
| | YDEDENQSPRSFQKK | CTTCTCTCAAAACCCACCAGTCTTGAAACGCCATCAACGGGAA |
| | TRHYFIAAVERLWDY | ATAACTCGTACTACTCTTCAGTCAGATCAAGAGGAAATCGATT |
| | GMSSSPHVLRNRAQS | ATGATGATACCATATCAGTTGAAATGAAGAAGGAAGATTTTG |
| | GSVPQFKKVVFQEFT | ACATTTATGATGAGGATGAAAATCAGAGCCCCCGCAGCTTTCA |
| | DGSFTQPLYRGELNE | AAAGAAAACACGACACTATTTTATTGCTGCAGTGGAGAGGCTC |
| | HLGLLGPYIRAEVED | TGGGATTATGGGATGAGTAGCTCCCCACATGTTCTAAGAAACA |
| | NIMVTFRNQASRPYS | GGGCTCAGAGTGGCAGTGTCCCTCAGTTCAAGAAAGTTGTTTT |
| | FYSSLISYEEDQRQGA | CCAGGAATTTACTGATGGCTCCTTTACTCAGCCCTTATACCGTG |
| | EPRKNFVKPNETKTY | GAGAACTAAATGAACATTTGGGACTCCTGGGGCCATATATAA |
| | FWKVQHHMAPTKDE | GAGCAGAAGTTGAAGATAATATCATGGTAACTTTCAGAAATC |
| | FDCKAWAYFSDVDL | AGGCCTCTCGTCCCTATTCCTTCTATTCTAGCCTTATTTCTTATG |
| | EKDVHSGLIGPLLVC | AGGAAGATCAGAGGCAAGGAGCAGAACCTAGAAAAAACTTTG |
| | HTNTLNPAHGRQVTV | TCAAGCCTAATGAAACCAAAACTTACTTTTGGAAAGTGCAACA |
| | QEFALFFTIFDETKSW | TCATATGGCACCCACTAAAGATGAGTTTGACTGCAAAGCCTGG |
| | YFTENMERNCRAPCN | GCTTATTTCTCTGATGTTGACCTGGAAAAAGATGTGCACTCAG |
| | IQMEDPTFKENYRFH | GCCTGATTGGACCCCTTCTGGTCTGCCACACTAACACACTGAA |
| | AINGYIMDTLPGLVM | CCCTGCTCATGGGAGACAAGTGACAGTACAGGAATTTGCTCTG |
| | AQDQRIRWYLLSMGS | TTTTTCACCATCTTTGATGAGACCAAAAGCTGGTACTTCACTG |
| | NENIHSIHFSGHVFTV | AAAATATGGAAAGAAACTGCAGGGCTCCCTGCAATATCCAGA |
| | RKKEEYKMALYNLY | TGGAAGATCCCACTTTTAAAGAGAATTATCGCTTCCATGCAAT |
| | PGVFETVEMLPSKAG | CAATGGCTACATAATGGATACACTACCTGGCTTAGTAATGGCT |
| | IWRVECLIGEHLHAG | CAGGATCAAAGGATTCGATGGTATCTGCTCAGCATGGGCAGC |
| | MSTLFLVYSNKCQTP | AATGAAAACATCCATTCTATTCATTTCAGTGGACATGTGTTCA |
| | LGMASGHIRDFQITAS | CTGTACGAAAAAAAGAGGAGTATAAAATGGCACTGTACAATC |
| | GQYGQWAPKLARLH | TCTATCCAGGTGTTTTTGAGACAGTGGAAATGTTACCATCCAA |
| | YSGSINAWSTKEPFS | AGCTGGAATTTGGCGGGTGGAATGCCTTATTGGCGAGCATCTA |
| | WIKVDLLAPMIIHGIK | CATGCTGGGATGAGCACACTTTTTCTGGTGTACAGCAATAAGT |
| | TQGARQKFSSLYISQF | GTCAGACTCCCCTGGGAATGGCTTCTGGACACATTAGAGATTT |
| | IIMYSLDGKKWQTYR | TCAGATTACAGCTTCAGGACAATATGGACAGTGGGCCCCAAA |
| | GNSTGTLMVFFGNVD | GCTGGCCAGACTTCATTATTCCGGATCAATCAATGCCTGGAGC |
| | SSGIKHNIFNPPIIARYI | ACCAAGGAGCCCTTTTCTTGGATCAAGGTGGATCTGTTGGCAC |
| | RLHPTHYSIRSTLRME | CAATGATTATTCACGGCATCAAGACCCAGGGTGCCCGTCAGAA |
| | LMGCDLNSCSMPLG | GTTCTCCAGCCTCTACATCTCTCAGTTTATCATCATGTATAGTC |
| | MESKAISDAQITASSY | TTGATGGGAAGAAGTGGCAGACTTATCGAGGAAATTCCACTG |
| | FTNMFATWSPSKARL | GAACCTTAATGGTCTTCTTTGGCAATGTGGATTCATCTGGGAT |
| | HLQGRSNAWRPQVN | AAAACACAATATTTTTAACCCTCCAATTATTGCTCGATACATC |
| | NPKEWLQVDFQKTM | CGTTTGCACCCAACTCATTATAGCATTCGCAGCACTCTTCGCAT |
| | KVTGVTTQGVKSLLT | GGAGTTGATGGGCTGTGATTTAAATAGTTGCAGCATGCCATTG |
| | SMYVKEFLISSSQDG | GGAATGGAGAGTAAAGCAATATCAGATGCACAGATTACTGCT |
| | HQWTLFFQNGKVKV | TCATCCTACTTTACCAATATGTTTGCCACCTGGTCTCCTTCAAA |
| | FQGNQDSFTPVVNSL | AGCTCGACTTCACCTCCAAGGGAGGAGTAATGCCTGGAGACCT |
| | DPPLLTRYLRIHPQSW | CAGGTGAATAATCCAAAAGAGTGGCTGCAAGTGGACTTCCAG |
| | VHQIALRMEVLGCEA | AAGACAATGAAAGTCACAGGAGTAACTACTCAGGGAGTAAAA |
| | QDLYGAGSPGAETAE | TCTCTGCTTACCAGCATGTATGTGAAGGAGTTCCTCATCTCCA |
| | QKLISEEDLSPATG | GCAGTCAAGATGGCCATCAGTGGACTCTCTTTTTTCAGAATGG |
| | | CAAAGTAAAGGTTTTTCAGGGAAATCAAGACTCCTTCACACCT |
| | | GTGGTGAACTCTCTAGACCCACCGTTACTGACTCGCTACCTTC |
| | | GAATTCACCCCCAGAGTTGGGTGCACCAGATTGCCCTGAGGAT |
| | | GGAGGTTCTGGGCTGCGAGGCACAGGACCTCTACGGCGCCGG |
| | | ATCACCTGGGGCCGAAACGGCCGAACAAAAACTCATCTCAGA |
| | | AGAGGATCTGTCACCTGCAACCGGTTGA |
| pBC0135 | MQIELSTCFFLCLLRF | ATGCAAATAGAGCTCTCCACCTGCTTCTTTCTGTGCCTTTTGCG |
| | CFSATRRYYLGAVEL | ATTCTGCTTTAGTGCCACCAGAAGATACTACCTGGGTGCAGTG |
| | SWDYMQSDLGELPV | GAACTGTCATGGGACTATATGCAAAGTGATCTCGGTGAGCTGC |
| | DARFPPRVPKSFPFNT | CTGTGGACGCAAGATTTCCTCCTAGAGTGCCAAAATCTTTTCC |
| | SVVYKKTLFVEFTDH | ATTCAACACCTCAGTCGTGTACAAAAAGACTCTGTTTGTAGAA |
| | LFNIAKPRPPWMGLL | TTCACGGATCACCTTTTCAACATCGCTAAGCCAAGGCCACCCT |
| | GPTIQAEVYDTVVITL | GGATGGGTCTGCTAGGTCCTACCATCCAGGCTGAGGTTTATGA |
| | KNMASHPVSLHAVG | TACAGTGGTCATTACACTTAAGAACATGGCTTCCCATCCTGTC |
| | VSYWKASEGAEYDD | AGTCTTCATGCTGTTGGTGTATCCTACTGGAAAGCTTCTGAGG |
| | QTSQREKEDDKVFPG | GAGCTGAATATGATGATCAGACCAGTCAAAGGGAGAAAGAAG |
| | GSHTYVWQVLKENG | ATGATAAAGTCTTCCCTGGTGGAAGCCATACATATGTCTGGCA |
| | PMASDPLCLTYSYLS | GGTCCTGAAAGAGAATGGTCCAATGGCCTCTGACCCACTGTGC |
| | HVDLVKDLNSGLIGA | CTTACCTACTCATATCTTTCTCATGTGGACCTGGTAAAAGACTT |
| | LLVCREGSLAKEKTQ | GAATTCAGGCCTCATTGGAGCCCTACTAGTATGTAGAGAAGGG |
| | TLHKFILLFAVFDEGK | AGTCTGGCCAAGGAAAAGACACAGACCTTGCACAAATTTATA |
| | SWHSETKNSLMQDR | CTACTTTTTGCTGTATTTGATGAAGGGAAAAGTTGGCACTCAG |
| | DAASARAWPKMHTV | AAACAAAGAACTCCTTGATGCAGGATAGGGATGCTGCATCTG |
| | NGYVNRSLPGLIGCH | CTCGGGCCTGGCCTAAAATGCACACAGTCAATGGTTATGTAAA |
| | RKSVYWHVIGMGTT | CAGGTCTCTGCCAGGTCTGATTGGATGCCACAGGAAATCAGTC |
| | PEVHSIFLEGHTFLVR | TATTGGCATGTGATTGGAATGGGCACCACTCCTGAAGTGCACT |
| | NHRQASLEISPITFLT | CAATATTCCTCGAAGGTCACACATTTCTTGTGAGGAACCATCG |
| | AQTLLMDLGQFLLFC | CCAGGCTAGCTTGGAAATCTCGCCAATAACTTTCCTTACTGCT |
| | HISSHQHDGMEAYVK | CAAACACTCTTGATGGACCTTGGACAGTTTCTACTGTTTTGTCA |
| | VDSCPEEPQLRMKNN | TATCTCTTCCCACCAACATGATGGCATGGAAGCTTATGTCAAA |
| | EEAEDYDDDLTDSEM | GTAGACAGCTGTCCAGAGGAACCCCAACTACGAATGAAAAAT |
| | DVVRFDDDNSPSFIQI | AATGAAGAAGCGGAAGACTATGATGATGATCTTACTGATTCTG |
| | RSVAKKHPKTWVHYI | AAATGGATGTGGTCAGGTTTGATGATGACAACTCTCCTTCCTT |
| | AAEEEDWDYAPLVL | TATCCAAATTCGCTCAGTTGCCAAGAAGCATCCTAAAACTTGG |
| | APDDRSYKSQYLNNG | GTACATTACATTGCTGCTGAAGAGGAGGACTGGGACTATGCTC |
| | PQRIGRKYKKVRFMA | CCTTAGTCCTCGCCCCCGATGACAGAAGTTATAAAAGTCAATA |
| | YTDETFKTREAIQHES | TTTGAACAATGGCCCTCAGCGGATTGGTAGGAAGTACAAAAA |
| | GILGPLLYGEVGDTL | AGTCCGATTTATGGCATACACAGATGAAACCTTTAAGACTCGT |
| | LIIFKNQASRPYNIYP | GAAGCTATTCAGCATGAATCAGGAATCTTGGGACCTTTACTTT |
| | HGITDVRPLYSRRLPK | ATGGGGAAGTTGGAGACACACTGTTGATTATATTTAAGAATCA |
| | GVKHLKDFPILPGEIF | AGCAAGCAGACCATATAACATCTACCCTCACGGAATCACTGAT |
| | KYKWTVTVEDGPTK | GTCCGTCCTTTGTATTCAAGGAGATTACCAAAAGGTGTAAAAC |
| | SDPRCLTRYYSSFVN | ATTTGAAGGATTTTCCAATTCTGCCAGGAGAAATATTCAAATA |
| | MERDLASGLIGPLLIC | TAAATGGACAGTGACTGTAGAAGATGGGCCAACTAAATCAGA |
| | YKESVDQRGNQIMSD | TCCTCGGTGCCTGACCCGCTATTACTCTAGTTTCGTTAATATGG |
| | KRNVILFSVFDENRS | AGAGAGATCTAGCTTCAGGACTCATTGGCCCTCTCCTCATCTG |
| | WYLTENIQRFLPNPA | CTACAAAGAATCTGTAGATCAAAGAGGAAACCAGATAATGTC |
| | GVQLEDPEFQASNIM | AGACAAGAGGAATGTCATCCTGTTTTCTGTATTTGATGAGAAC |
| | HSINGYVFDSLQLSV | CGAAGCTGGTACCTCACAGAGAATATACAACGCTTTCTCCCCA |
| | CLHEVAYWYILSIGA | ATCCAGCTGGAGTGCAGCTTGAGGATCCAGAGTTCCAAGCCTC |
| | QTDFLSVFFSGYTFK | CAACATCATGCACAGCATCAATGGCTATGTTTTTGATAGTTTG |
| | HKMVYEDTLTLFPFS | CAGTTGTCAGTTTGTTTGCATGAGGTGGCATACTGGTACATTCT |
| | GETVFMSMENPGLWI | AAGCATTGGAGCACAGACTGACTTCCTTTCTGTCTTCTTCTCTG |
| | LGCHNSDFRNRGMT | GATATACCTTCAAACACAAAATGGTCTATGAAGACACACTCAC |
| | ALLKVSSCDKNTGDY | CCTATTCCCATTCTCAGGAGAAACTGTCTTCATGTCGATGGAA |
| | YEDSYEDISAYLLSK | AACCCAGGTCTATGGATTCTGGGGTGCCACAACTCAGACTTTC |
| | NNAIEPRSFSQNGAPG | GGAACAGAGGCATGACCGCCTTACTGAAGGTTTCTAGTTGTGA |
| | SPAGSPTSTEEGTSES | CAAGAACACTGGTGATTATTACGAGGACAGTTATGAAGATATT |
| | ATPESGPGSEPATSGS | TCAGCATACTTGCTGAGTAAAAACAATGCCATTGAACCAAGA |
| | ETPASSPPVLKRHQRE | AGCTTCTCTCAAAACGGCGCGCCAGGTTCTCCTGCTGGCTCCC |
| | ITRTTLQSDQEEIDYD | CCACCTCAACAGAAGAGGGGACAAGCGAAAGCGCTACGCCTG |
| | DTISVEMKKEDFDIY | AGAGTGGCCCTGGCTCTGAGCCAGCCACCTCCGGCTCTGAAAC |
| | DEDENQSPRSFQKKT | CCCTGCCTCGAGCCCACCAGTCTTGAAACGCCATCAACGGGAA |
| | RHYFIAAVERLWDYG | ATAACTCGTACTACTCTTCAGTCAGATCAAGAGGAAATCGATT |
| | MSSSPHVLRNRAQSG | ATGATGATACCATATCAGTTGAAATGAAGAAGGAAGATTTTG |
| | SVPQFKKVVFQEFTD | ACATTTATGATGAGGATGAAAATCAGAGCCCCCGCAGCTTTCA |
| | GSFTQPLYRGELNEH | AAAGAAAACACGACACTATTTTATTGCTGCAGTGGAGAGGCTC |
| | LGLLGPYIRAEVEDNI | TGGGATTATGGGATGAGTAGCTCCCCACATGTTCTAAGAAACA |
| | MVTFRNQASRPYSFY | GGGCTCAGAGTGGCAGTGTCCCTCAGTTCAAGAAAGTTGTTTT |
| | SSLISYEEDQRQGAEP | CCAGGAATTTACTGATGGCTCCTTTACTCAGCCCTTATACCGTG |
| | RKNFVKPNETKTYFW | GAGAACTAAATGAACATTTGGGACTCCTGGGGCCATATATAA |
| | KVQHHMAPTKDEFD | GAGCAGAAGTTGAAGATAATATCATGGTAACTTTCAGAAATC |
| | CKAWAYFSDVDLEK | AGGCCTCTCGTCCCTATTCCTTCTATTCTAGCCTTATTTCTTATG |
| | DVHSGLIGPLLVCHT | AGGAAGATCAGAGGCAAGGAGCAGAACCTAGAAAAAACTTTG |
| | NTLNPAHGRQVTVQE | TCAAGCCTAATGAAACCAAAACTTACTTTTGGAAAGTGCAACA |
| | FALFFTIFDETKSWYF | TCATATGGCACCCACTAAAGATGAGTTTGACTGCAAAGCCTGG |
| | TENMERNCRAPCNIQ | GCTTATTTCTCTGATGTTGACCTGGAAAAAGATGTGCACTCAG |
| | MEDPTFKENYRFHAI | GCCTGATTGGACCCCTTCTGGTCTGCCACACTAACACACTGAA |
| | NGYIMDTLPGLVMA | CCCTGCTCATGGGAGACAAGTGACAGTACAGGAATTTGCTCTG |
| | QDQRIRWYLLSMGSN | TTTTTCACCATCTTTGATGAGACCAAAAGCTGGTACTTCACTG |
| | ENIHSIHFSGHVFTVR | AAAATATGGAAAGAAACTGCAGGGCTCCCTGCAATATCCAGA |
| | KKEEYKMALYNLYP | TGGAAGATCCCACTTTTAAAGAGAATTATCGCTTCCATGCAAT |
| | GVFETVEMLPSKAGI | CAATGGCTACATAATGGATACACTACCTGGCTTAGTAATGGCT |
| | WRVECLIGEHLHAG | CAGGATCAAAGGATTCGATGGTATCTGCTCAGCATGGGCAGC |
| | MSTLFLVYSNKCQTP | AATGAAAACATCCATTCTATTCATTTCAGTGGACATGTGTTCA |
| | LGMASGHIRDFQITAS | CTGTACGAAAAAAAGAGGAGTATAAAATGGCACTGTACAATC |
| | GQYGQWAPKLARLH | TCTATCCAGGTGTTTTTGAGACAGTGGAAATGTTACCATCCAA |
| | YSGSINAWSTKEPFS | AGCTGGAATTTGGCGGGTGGAATGCCTTATTGGCGAGCATCTA |
| | WIKVDLLAPMIIHGIK | CATGCTGGGATGAGCACACTTTTTCTGGTGTACAGCAATAAGT |
| | TQGARQKFSSLYISQF | GTCAGACTCCCCTGGGAATGGCTTCTGGACACATTAGAGATTT |
| | IIMYSLDGKKWQTYR | TCAGATTACAGCTTCAGGACAATATGGACAGTGGGCCCCAAA |
| | GNSTGTLMVFFGNVD | GCTGGCCAGACTTCATTATTCCGGATCAATCAATGCCTGGAGC |
| | SSGIKHNIFNPPIIARYI | ACCAAGGAGCCCTTTTCTTGGATCAAGGTGGATCTGTTGGCAC |
| | RLHPTHYSIRSTLRME | CAATGATTATTCACGGCATCAAGACCCAGGGTGCCCGTCAGAA |
| | LMGCDLNSCSMPLG | GTTCTCCAGCCTCTACATCTCTCAGTTTATCATCATGTATAGTC |
| | MESKAISDAQITASSY | TTGATGGGAAGAAGTGGCAGACTTATCGAGGAAATTCCACTG |
| | FTNMFATWSPSKARL | GAACCTTAATGGTCTTCTTTGGCAATGTGGATTCATCTGGGAT |
| | HLQGRSNAWRPQVN | AAAACACAATATTTTTAACCCTCCAATTATTGCTCGATACATC |
| | NPKEWLQVDFQKTM | CGTTTGCACCCAACTCATTATAGCATTCGCAGCACTCTTCGCAT |
| | KVTGVTTQGVKSLLT | GGAGTTGATGGGCTGTGATTTAAATAGTTGCAGCATGCCATTG |
| | SMYVKEFLISSSQDG | GGAATGGAGAGTAAAGCAATATCAGATGCACAGATTACTGCT |
| | HQWTLFFQNGKVKV | TCATCCTACTTTACCAATATGTTTGCCACCTGGTCTCCTTCAAA |
| | FQGNQDSFTPVVNSL | AGCTCGACTTCACCTCCAAGGGAGGAGTAATGCCTGGAGACCT |
| | DPPLLTRYLRIHPQSW | CAGGTGAATAATCCAAAAGAGTGGCTGCAAGTGGACTTCCAG |
| | VHQIALRMEVLGCEA | AAGACAATGAAAGTCACAGGAGTAACTACTCAGGGAGTAAAA |
| | QDLYGAGSPGAETAE | TCTCTGCTTACCAGCATGTATGTGAAGGAGTTCCTCATCTCCA |
| | QKLISEEDLSPATG | GCAGTCAAGATGGCCATCAGTGGACTCTCTTTTTTCAGAATGG |
| | | CAAAGTAAAGGTTTTTCAGGGAAATCAAGACTCCTTCACACCT |
| | | GTGGTGAACTCTCTAGACCCACCGTTACTGACTCGCTACCTTC |
| | | GAATTCACCCCCAGAGTTGGGTGCACCAGATTGCCCTGAGGAT |
| | | GGAGGTTCTGGGCTGCGAGGCACAGGACCTCTACGGCGCCGG |
| | | ATCACCTGGGGCCGAAACGGCCGAACAAAAACTCATCTCAGA |
| | | AGAGGATCTGTCACCTGCAACCGGTTGA |
| pBC0135- | MQIELSTCFFLCLL | atgcaaatagagctctccacctgcttctttctgtgccttttgcgattctgctttagtgccaccagaagatacta |
| 2 | RFCFSATRRYYLGA | cctgggtgcagtggaactgtcatgggactatatgcaaagtgatctcggtgagctgcctgtggacgcaag |
| | VELSWDYMQSDLG | atttcctcctagagtgccaaaatcttttccattcaacacctcagtcgtgtacaaaaagactctgtttgtagaat |
| | ELPVDARFPPRVPK | tcacggatcaccttttcaacatcgctaagccaaggccaccctggatgggtctgctaggtcctaccatcca |
| | SFPFNTSVVYKKTL | ggctgaggtttatgatacagtggtcattacacttaagaacatggcttcccatcctgtcagtcttcatgctgtt |
| | FVEFTDHLFNIAKP | ggtgtatcctactggaaagcttctgagggagctgaatatgatgatcagaccagtcaaagggagaaagaa |
| | RPPWMGLLGPTIQA | gatgataaagtcttccctggtggaagccatacatatgtctggcaggtcctgaaagagaatggtccaatgg |
| | EVYDTVVITLKNM | cctctgacccactgtgccttacctactcatatctttctcatgtggacctggtaaaagacttgaattcaggcct |
| | ASHPVSLHAVGVS | cattggagccctactagtatgtagagaagggagtctggccaaggaaaagacacagaccttgcacaaatt |
| | YWKASEGAEYDDQ | tatactactttttgctgtatttgatgaagggaaaagttggcactcagaaacaaagaactccttgatgcagga |
| | TSQREKEDDKVFPG | tagggatgctgcatctgctcgggcctggcctaaaatgcacacagtcaatggttatgtaaacaggtctctg |
| | GSHTYVWQVLKEN | ccaggtctgattggatgccacaggaaatcagtctattggcatgtgattggaatgggcaccactcctgaag |
| | GPMASDPLCLTYSY | tgcactcaatattcctcgaaggtcacacatttcttgtgaGGAACCATCGCCAGGCTAGC |
| | LSHVDLVKDLNSG | TTGGAAATCTCGCCAATAACTttccttactgctcaaacactcttgatggaccttggaca |
| | LIGALLVCREGSLA | gtttctactgttttgtcatatctcttcccaccaacatgatggcatggaagcttatgtcaaagtagacagctgtc |
| | KEKTQTLHKFILLF | cagaggaaccccaactacgaatgaaaaataatgaagaagcggaagactatgatgatgatcttactgatt |
| | AVFDEGKSWHSET | ctgaaatggatgtggtcaggtttgatgatgacaactctccttcctttatccaaattcgctcagttgccaagaa |
| | KNSLMQDRDAASA | gcatcctaaaacttgggtacattacattgctgctgaagaggaggactgggactatgctcccttagtcctcg |
| | RAWPKMHTVNGY | cccccgatgacagaagttataaaagtcaatatttgaacaatggccctcagcggattggtaggaagtacaa |
| | VNRSLPGLIGCHRK | aaaagtccgatttatggcatacacagatgaaacctttaagactcgtgaagctattcagcatgaatcaggaa |
| | SVYWHVIGMGTTP | tcttgggacctttactttatggggaagttggagacacactgttgattatatttaagaatcaagcaagcagac |
| | EVHSIFLEGHTFLV | catataacatctaccctcacggaatcactgatgtccgtcctttgtattcaaggagattaccaaaaggtgtaa |
| | RNHRQASLEISPITF | aacatttgaaggattttccaattctgccaggagaaatattcaaatataaatggacagtgactgtagaagatg |
| | LTAQTLLMDLGQF | ggccaactaaatcagatcctcggtgcctgacccgctattactctagtttcgttaatatggagagagatcta |
| | LLFCHISSHQHDGM | gcttcaggactcattggccctctcctcatctgctacaaagaatctgtagatcaaagaggaaaccagataat |
| | EAYVKVDSCPEEPQ | gtcagacaagaggaatgtcatcctgttttctgtatttgatgagaaccgaagctggtacctcacagagaata |
| | LRMKNNEEAEDYD | tacaacgctttctccccaatccagctggagtgcagcttgaggatccagagttccaagcctccaacatcat |
| | DDLTDSEMDVVRF | gcacagcatcaatggctatgtttttgatagtttgcagttgtcagtttgtttgcatgaggtggcatactggtaca |
| | DDDNSPSFIQIRSVA | ttctaagcattggagcacagactgacttcctttctgtcttcttctctggatataccttcaaacacaaaatggtc |
| | KKHPKTWVHYIAA | tatgaagacacactcaccctattcccattctcaggagaaactgtcttcatgtcgatggaaaacccaggtct |
| | EEEDWDYAPLVLA | atggattctggggtgccacaactcagactttcggaacagaggcatgaccgccttactgaaggtttctagtt |
| | PDDRSYKSQYLNN | gtgacaagaacactggtgattattacgaggacagttatgaagatatttcagcatacttgctgagtaaaaac |
| | GPQRIGRKYKKVRF | aatgccattgaaccaagaagcttctctGGCGCGCCAGGTTCTCCTGCTGGCTCC |
| | MAYTDETFKTREAI | CCCACCTCAACAGAAGAGGGGACAAGcgaaagcgctacgcctgagaGTG |
| | QHESGILGPLLYGE | GCCCTGGCTCTGAGCCAGCCACCTCCGGCTCTGAAACCCCTGC |
| | VGDTLLIIFKNQAS | CTCGAGCcaaaacccaccagtcttgaaacgccatcaacgggaaataactcgtactacTCTTC |
| | RPYNIYPHGITDVR | AGTCAGATCAAGAGGAAATCGATTATGATGATACCATATCAGT |
| | PLYSRRLPKGVKHL | TGAAATGAAgaaggaagattttgacatttatgatgaggatgaaaatcagagcccccgcagatt |
| | KDFPILPGEIFKYK | caaaagaaaacacgacactattttattgctgcagtggagaggctctgggattatgggatgagtagctccc |
| | WTVTVEDGPTKSD | cacatgttctaagaaacagggctcagagtggcagtgtccctcagttcaagaaagttgttttccaggaattt |
| | PRCLTRYYSSFVNM | actgatggctcctttactcagcccttataccgtggagaactaaatgaacatttgggactcctggggccata |
| | ERDLASGLIGPLLIC | tataagagcagaagttgaagataatatcatggtaactttcagaaatcaggcctctcgtccctattccttctat |
| | YKESVDQRGNQIM | tctagccttatttcttatgaggaagatcagaggcaaggagcagaacctagaaaaaactttgtcaagccta |
| | SDKRNVILFSVFDE | atgaaaccaaaacttacttttggaaagtgcaacatcatatggcacccactaaagatgagtttgactgcaaa |
| | NRSWYLTENIQRFL | gcctgggcttatttctctgatgttgacctggaaaaagatgtgcactcaggcctgattggaccccttctggtc |
| | PNPAGVQLEDPEFQ | tgccacactaacacactgaaccctgctcatgggagacaagtgacagtacaggaatttgctctgtttttcac |
| | ASNIMHSINGYVFD | catctttgatgagaccaaaagctggtacttcactgaaaatatggaaagaaactgcagggctccctgcaat |
| | SLQLSVCLHEVAY | atccagatggaagatcccacttttaaagagaattatcgcttccatgcaatcaatggctacataatggataca |
| | WYILSIGAQTDFLS | ctacctggcttagtaatggctcaggatcaaaggattcgatggtatctgctcagcatgggcagcaatgaaa |
| | VFFSGYTFKHKMV | acatccattctattcatttcagtggacatgtgttcactgtacgaaaaaaagaggagtataaaatggcactgt |
| | YEDTLTLFPFSGET | acaatctctatccaggtgtttttgagacagtggaaatgttaccatccaaagctggaatttggcgggtggaa |
| | VFMSMENPGLWIL | tgccttattggcgagcatctacatgctgggatgagcacactttttctggtgtACAGCAATAAGT |
| | GCHNSDFRNRGMT | GTCAGACTCCcctgggaatggcttctggacacattagagattttcagattacagcttcaggacaa |
| | ALLKVSSCDKNTG | tatggacagtgggccccaaagctggccagacttcattattccggatcaatcaatgcctggagcaccaag |
| | DYYEDSYEDISAYL | gagcccttttcttggatcaaggtggatctgttggcaccaatgattattcacggcatcaagacccagggtgc |
| | LSKNNAIEPRSFSG | ccgtcagaagttctccagcctctacatctctcagtttatcatcatgtatagtcttgatgggaagaagtggca |
| | APGSPAGSPTSTEE | gacttatcgaggaaattccactggaaccttaatggtcttctttggcaatgtggattcatctgggataaaaca |
| | GTSESATPESGPGS | caatatttttaaccctccaattattgctcgatacatccgtttgcacccaactcattatagcattcgcagcactc |
| | EPATSGSETPASSQ | ttcgcatggagttgatgggctgtgatttaaatagttgcagcatgccattgggaatggagagtaaagcaata |
| | NPPVLKRHQREITR | tcagatgcacagattactgcttcatcctactttaccaatatgtttgccacctggtctccttcaaaagctcgact |
| | TTLQSDQEEIDYDD | tcacctccaagggaggagtaatgcctggagacctcaggtgaataatccaaaagagtggctgcaagtgg |
| | TISVEMKKEDFDIY | acttccagaagacaatgaaagtcacaggagtaactactcagggagtaaaatctctgcttaccagcatgta |
| | DEDENQSPRSFQKK | tgtgaaggagttcctcatctccagcagtcaagatggccatcagtggactctcttttttcagaatggcaaagt |
| | TRHYFIAAVERLW | aaaggtttttcagggaaatcaagactccttcacacctgtggtgaactctctagacccaccgttactgactc |
| | DYGMSSSPHVLRN | gctaccttcgaattcacccccagagttgggtgcaccagattgccctgaggatggaggttctgggctgcg |
| | RAQSGSVPQFKKV | aggcacaggacctctacggcgccggatcacctggggccgaaacggccgaacaaaaactcatctcag |
| | VFQEFTDGSFTQPL | aagaggatctgtcacctgcaaccggttga |
| | YRGELNEHLGLLGP | |
| | YIRAEVEDNIMVTF | |
| | RNQASRPYSFYSSLI | |
| | SYEEDQRQGAEPR | |
| | KNFVKPNETKTYF | |
| | WKVQHHMAPTKD | |
| | EFDCKAWAYFSDV | |
| | DLEKDVHSGLIGPL | |
| | LVCHTNTLNPAHG | |
| | RQVTVQEFALFFTI | |
| | FDETKSWYFTENM | |
| | ERNCRAPCNIQME | |
| | DPTFKENYRFHAIN | |
| | GYIMDTLPGLVMA | |
| | QDQRIRWYLLSMG | |
| | SNENIHSIHFSGHVF | |
| | TVRKKEEYKMALY | |
| | NLYPGVFETVEMLP | |
| | SKAGIWRVECLIGE | |
| | HLHAGMSTLFLVY | |
| | SNKCQTPLGMASG | |
| | HIRDFQITASGQYG | |
| | QWAPKLARLHYSG | |
| | SINAWSTKEPFSWI | |
| | KVDLLAPMIIHGIK | |
| | TQGARQKFSSLYIS | |
| | QFIIMYSLDGKKW | |
| | QTYRGNSTGTLMV | |
| | FFGNVDSSGIKHNIF | |
| | NPPIIARYIRLHPTH | |
| | YSIRSTLRMELMGC | |
| | DLNSCSMPLGMES | |
| | KAISDAQITASSYFT | |
| | NMFATWSPSKARL | |
| | HLQGRSNAWRPQV | |
| | NNPKEWLQVDFQK | |
| | TMKVTGVTTQGVK | |
| | SLLTSMYVKEFLISS | |
| | SQDGHQWTLFFQN | |
| | GKVKVFQGNQDSF | |
| | TPVVNSLDPPLLTR | |
| | YLRIHPQSWVHQIA | |
| | LRMEVLGCEAQDL | |
| | YGAGSPGAETAEQ | |
| | KLISEEDLSPATG | |
| pBC0149 | MQIELSTCFFLCLLRF | ATGCAAATAGAGCTCTCCACCTGCTTCTTTCTGTGCCTTTTGCG |
| | CFSATRRYYLGAVEL | ATTCTGCTTTAGTGCCACCAGAAGATACTACCTGGGTGCAGTG |
| | SWDYMQSDLGELPV | GAACTGTCATGGGACTATATGCAAAGTGATCTCGGTGAGCTGC |
| | DARFPPRVPKSFPFNT | CTGTGGACGCAAGATTTCCTCCTAGAGTGCCAAAATCTTTTCC |
| | SVVYKKTLFVEFTDH | ATTCAACACCTCAGTCGTGTACAAAAAGACTCTGTTTGTAGAA |
| | LFNIAKPRPPWMGLL | TTCACGGATCACCTTTTCAACATCGCTAAGCCAAGGCCACCCT |
| | GPTIQAEVYDTVVITL | GGATGGGTCTGCTAGGTCCTACCATCCAGGCTGAGGTTTATGA |
| | KNMASHPVSLHAVG | TACAGTGGTCATTACACTTAAGAACATGGCTTCCCATCCTGTC |
| | VSYWKASEGAEYDD | AGTCTTCATGCTGTTGGTGTATCCTACTGGAAAGCTTCTGAGG |
| | QTSQREKEDDKVFPG | GAGCTGAATATGATGATCAGACCAGTCAAAGGGAGAAAGAAG |
| | GSHTYVWQVLKENG | ATGATAAAGTCTTCCCTGGTGGAAGCCATACATATGTCTGGCA |
| | PMASDPLCLTYSYLS | GGTCCTGAAAGAGAATGGTCCAATGGCCTCTGACCCACTGTGC |
| | HVDLVKDLNSGLIGA | CTTACCTACTCATATCTTTCTCATGTGGACCTGGTAAAAGACTT |
| | LLVCREGSLAKEKTQ | GAATTCAGGCCTCATTGGAGCCCTACTAGTATGTAGAGAAGGG |
| | TLHKFILLFAVFDEGK | AGTCTGGCCAAGGAAAAGACACAGACCTTGCACAAATTTATA |
| | SWHSETKNSLMQDR | CTACTTTTTGCTGTATTTGATGAAGGGAAAAGTTGGCACTCAG |
| | DAASARAWPKMHTV | AAACAAAGAACTCCTTGATGCAGGATAGGGATGCTGCATCTG |
| | NGYVNRSLPGLIGCH | CTCGGGCCTGGCCTAAAATGCACACAGTCAATGGTTATGTAAA |
| | RKSVYWHVIGMGTT | CAGGTCTCTGCCAGGTCTGATTGGATGCCACAGGAAATCAGTC |
| | PEVHSIFLEGHTFLVR | TATTGGCATGTGATTGGAATGGGCACCACTCCTGAAGTGCACT |
| | NHRQASLEISPITFLT | CAATATTCCTCGAAGGTCACACATTTCTTGTGAGGAACCATCG |
| | AQTLLMDLGQFLLFC | CCAGGCTAGCTTGGAAATCTCGCCAATAACTTTCCTTACTGCT |
| | HISSHQHDGMEAYVK | CAAACACTCTTGATGGACCTTGGACAGTTTCTACTGTTTTGTCA |
| | VDSCPEEPQLRMKNN | TATCTCTTCCCACCAACATGATGGCATGGAAGCTTATGTCAAA |
| | EEAEDYDDDLTDSEM | GTAGACAGCTGTCCAGAGGAACCCCAACTACGAATGAAAAAT |
| | DVVRFDDDNSPSFIQI | AATGAAGAAGCGGAAGACTATGATGATGATCTTACTGATTCTG |
| | RSVAKKHPKTWVHYI | AAATGGATGTGGTCAGGTTTGATGATGACAACTCTCCTTCCTT |
| | AAEEEDWDYAPLVL | TATCCAAATTCGCTCAGTTGCCAAGAAGCATCCTAAAACTTGG |
| | APDDRSYKSQYLNNG | GTACATTACATTGCTGCTGAAGAGGAGGACTGGGACTATGCTC |
| | PQRIGRKYKKVRFMA | CCTTAGTCCTCGCCCCCGATGACAGAAGTTATAAAAGTCAATA |
| | YTDETFKTREAIQHES | TTTGAACAATGGCCCTCAGCGGATTGGTAGGAAGTACAAAAA |
| | GILGPLLYGEVGDTL | AGTCCGATTTATGGCATACACAGATGAAACCTTTAAGACTCGT |
| | LIIFKNQASRPYNIYP | GAAGCTATTCAGCATGAATCAGGAATCTTGGGACCTTTACTTT |
| | HGITDVRPLYSRRLPK | ATGGGGAAGTTGGAGACACACTGTTGATTATATTTAAGAATCA |
| | GVKHLKDFPILPGEIF | AGCAAGCAGACCATATAACATCTACCCTCACGGAATCACTGAT |
| | KYKWTVTVEDGPTK | GTCCGTCCTTTGTATTCAAGGAGATTACCAAAAGGTGTAAAAC |
| | SDPRCLTRYYSSFVN | ATTTGAAGGATTTTCCAATTCTGCCAGGAGAAATATTCAAATA |
| | MERDLASGLIGPLLIC | TAAATGGACAGTGACTGTAGAAGATGGGCCAACTAAATCAGA |
| | YKESVDQRGNQIMSD | TCCTCGGTGCCTGACCCGCTATTACTCTAGTTTCGTTAATATGG |
| | KRNVILFSVFDENRS | AGAGAGATCTAGCTTCAGGACTCATTGGCCCTCTCCTCATCTG |
| | WYLTENIQRFLPNPA | CTACAAAGAATCTGTAGATCAAAGAGGAAACCAGATAATGTC |
| | GVQLEDPEFQASNIM | AGACAAGAGGAATGTCATCCTGTTTTCTGTATTTGATGAGAAC |
| | HSINGYVFDSLQLSV | CGAAGCTGGTACCTCACAGAGAATATACAACGCTTTCTCCCCA |
| | CLHEVAYWYILSIGA | ATCCAGCTGGAGTGCAGCTTGAGGATCCAGAGTTCCAAGCCTC |
| | QTDFLSVFFSGYTFK | CAACATCATGCACAGCATCAATGGCTATGTTTTTGATAGTTTG |
| | HKMVYEDTLTLFPFS | CAGTTGTCAGTTTGTTTGCATGAGGTGGCATACTGGTACATTCT |
| | GETVFMSMENPGLWI | AAGCATTGGAGCACAGACTGACTTCCTTTCTGTCTTCTTCTCTG |
| | LGCHNSDFRNRGMT | GATATACCTTCAAACACAAAATGGTCTATGAAGACACACTCAC |
| | ALLKVSSCDKNTGDY | CCTATTCCCATTCTCAGGAGAAACTGTCTTCATGTCGATGGAA |
| | YEDSYEDISAYLLSK | AACCCAGGTCTATGGATTCTGGGGTGCCACAACTCAGACTTTC |
| | NNAIEPRSFSQNGAPG | GGAACAGAGGCATGACCGCCTTACTGAAGGTTTCTAGTTGTGA |
| | SPAGSPTSTEEGTSES | CAAGAACACTGGTGATTATTACGAGGACAGTTATGAAGATATT |
| | ATPESGPGSEPATSGS | TCAGCATACTTGCTGAGTAAAAACAATGCCATTGAACCAAGA |
| | ETPASSPPVLKRHQA | AGCTTCTCTCAAAACGGCGCGCCAGGTTCTCCTGCTGGCTCCC |
| | EITRTTLQSDQEEIDY | CCACCTCAACAGAAGAGGGGACAAGCGAAAGCGCTACGCCTG |
| | DDTISVEMKKEDFDI | AGAGTGGCCCTGGCTCTGAGCCAGCCACCTCCGGCTCTGAAAC |
| | YDEDENQSPRSFQKK | CCCTGCCTCGAGCCCACCAGTCTTGAAACGCCATCAAGCTGAA |
| | TRHYFIAAVERLWDY | ATAACTCGTACTACTCTTCAGTCAGATCAAGAGGAAATCGATT |
| | GMSSSPHVLRNRAQS | ATGATGATACCATATCAGTTGAAATGAAGAAGGAAGATTTTG |
| | GSVPQFKKVVFQEFT | ACATTTATGATGAGGATGAAAATCAGAGCCCCCGCAGCTTTCA |
| | DGSFTQPLYRGELNE | AAAGAAAACACGACACTATTTTATTGCTGCAGTGGAGAGGCTC |
| | HLGLLGPYIRAEVED | TGGGATTATGGGATGAGTAGCTCCCCACATGTTCTAAGAAACA |
| | NIMVTFRNQASRPYS | GGGCTCAGAGTGGCAGTGTCCCTCAGTTCAAGAAAGTTGTTTT |
| | FYSSLISYEEDQRQGA | CCAGGAATTTACTGATGGCTCCTTTACTCAGCCCTTATACCGTG |
| | EPRKNFVKPNETKTY | GAGAACTAAATGAACATTTGGGACTCCTGGGGCCATATATAA |
| | FWKVQHHMAPTKDE | GAGCAGAAGTTGAAGATAATATCATGGTAACTTTCAGAAATC |
| | FDCKAWAYFSDVDL | AGGCCTCTCGTCCCTATTCCTTCTATTCTAGCCTTATTTCTTATG |
| | EKDVHSGLIGPLLVC | AGGAAGATCAGAGGCAAGGAGCAGAACCTAGAAAAAACTTTG |
| | HTNTLNPAHGRQVTV | TCAAGCCTAATGAAACCAAAACTTACTTTTGGAAAGTGCAACA |
| | QEFALFFTIFDETKSW | TCATATGGCACCCACTAAAGATGAGTTTGACTGCAAAGCCTGG |
| | YFTENMERNCRAPCN | GCTTATTTCTCTGATGTTGACCTGGAAAAAGATGTGCACTCAG |
| | IQMEDPTFKENYRFH | GCCTGATTGGACCCCTTCTGGTCTGCCACACTAACACACTGAA |
| | AINGYIMDTLPGLVM | CCCTGCTCATGGGAGACAAGTGACAGTACAGGAATTTGCTCTG |
| | AQDQRIRWYLLSMGS | TTTTTCACCATCTTTGATGAGACCAAAAGCTGGTACTTCACTG |
| | NENIHSIHFSGHVFTV | AAAATATGGAAAGAAACTGCAGGGCTCCCTGCAATATCCAGA |
| | RKKEEYKMALYNLY | TGGAAGATCCCACTTTTAAAGAGAATTATCGCTTCCATGCAAT |
| | PGVFETVEMLPSKAG | CAATGGCTACATAATGGATACACTACCTGGCTTAGTAATGGCT |
| | IWRVECLIGEHLHAG | CAGGATCAAAGGATTCGATGGTATCTGCTCAGCATGGGCAGC |
| | MSTLFLVYSNKCQTP | AATGAAAACATCCATTCTATTCATTTCAGTGGACATGTGTTCA |
| | LGMASGHIRDFQITAS | CTGTACGAAAAAAAGAGGAGTATAAAATGGCACTGTACAATC |
| | GQYGQWAPKLARLH | TCTATCCAGGTGTTTTTGAGACAGTGGAAATGTTACCATCCAA |
| | YSGSINAWSTKEPFS | AGCTGGAATTTGGCGGGTGGAATGCCTTATTGGCGAGCATCTA |
| | WIKVDLLAPMIIHGIK | CATGCTGGGATGAGCACACTTTTTCTGGTGTACAGCAATAAGT |
| | TQGARQKFSSLYISQF | GTCAGACTCCCCTGGGAATGGCTTCTGGACACATTAGAGATTT |
| | IIMYSLDGKKWQTYR | TCAGATTACAGCTTCAGGACAATATGGACAGTGGGCCCCAAA |
| | GNSTGTLMVFFGNVD | GCTGGCCAGACTTCATTATTCCGGATCAATCAATGCCTGGAGC |
| | SSGIKHNIFNPPIIARYI | ACCAAGGAGCCCTTTTCTTGGATCAAGGTGGATCTGTTGGCAC |
| | RLHPTHYSIRSTLRME | CAATGATTATTCACGGCATCAAGACCCAGGGTGCCCGTCAGAA |
| | LMGCDLNSCSMPLG | GTTCTCCAGCCTCTACATCTCTCAGTTTATCATCATGTATAGTC |
| | MESKAISDAQITASSY | TTGATGGGAAGAAGTGGCAGACTTATCGAGGAAATTCCACTG |
| | FTNMFATWSPSKARL | GAACCTTAATGGTCTTCTTTGGCAATGTGGATTCATCTGGGAT |
| | HLQGRSNAWRPQVN | AAAACACAATATTTTTAACCCTCCAATTATTGCTCGATACATC |
| | NPKEWLQVDFQKTM | CGTTTGCACCCAACTCATTATAGCATTCGCAGCACTCTTCGCAT |
| | KVTGVTTQGVKSLLT | GGAGTTGATGGGCTGTGATTTAAATAGTTGCAGCATGCCATTG |
| | SMYVKEFLISSSQDG | GGAATGGAGAGTAAAGCAATATCAGATGCACAGATTACTGCT |
| | HQWTLFFQNGKVKV | TCATCCTACTTTACCAATATGTTTGCCACCTGGTCTCCTTCAAA |
| | FQGNQDSFTPVVNSL | AGCTCGACTTCACCTCCAAGGGAGGAGTAATGCCTGGAGACCT |
| | DPPLLTRYLRIHPQSW | CAGGTGAATAATCCAAAAGAGTGGCTGCAAGTGGACTTCCAG |
| | VHQIALRMEVLGCEA | AAGACAATGAAAGTCACAGGAGTAACTACTCAGGGAGTAAAA |
| | QDLYGAGSPGAETAE | TCTCTGCTTACCAGCATGTATGTGAAGGAGTTCCTCATCTCCA |
| | QKLISEEDLSPATG | GCAGTCAAGATGGCCATCAGTGGACTCTCTTTTTTCAGAATGG |
| | | CAAAGTAAAGGTTTTTCAGGGAAATCAAGACTCCTTCACACCT |
| | | GTGGTGAACTCTCTAGACCCACCGTTACTGACTCGCTACCTTC |
| | | GAATTCACCCCCAGAGTTGGGTGCACCAGATTGCCCTGAGGAT |
| | | GGAGGTTCTGGGCTGCGAGGCACAGGACCTCTACGGCGCCGG |
| | | ATCACCTGGGGCCGAAACGGCCGAACAAAAACTCATCTCAGA |
| | | AGAGGATCTGTCACCTGCAACCGGTTGA |
| pBC0149- | MQIELSTCFFLCLL | atgcaaatagagctctccacctgcttctttctgtgccttttgcgattctgctttagtgccaccagaa |
| 2 | RFCFSATRRYYLGA | gatactacctgggtgcagtggaactgtcatgggactatatgcaaagtgatctcggtgagctgc |
| | VELSWDYMQSDLG | ctgtggacgcaagatttcctcctagagtgccaaaatcttttccattcaacacctcagtcgtgtaca |
| | ELPVDARFPPRVPK | aaaagactctgtttgtagaattcacggatcaccttttcaacatcgctaagccaaggccaccctg |
| | SFPFNTSVVYKKTL | gatgggtctgctaggtcctaccatccaggctgaggtttatgatacagtggtcattacacttaaga |
| | FVEFTDHLFNIAKP | acatggcttcccatcctgtcagtcttcatgctgttggtgtatcctactggaaagcttctgagggag |
| | RPPWMGLLGPTIQA | ctgaatatgatgatcagaccagtcaaagggagaaagaagatgataaagtcttccctggtggaa |
| | EVYDTVVITLKNM | gccatacatatgtcggcaggtcctgaaagagaatggtccaatggcctctgacccactgtgcct |
| | ASHPVSLHAVGVS | tacctactcatatctttctcatgtggacctggtaaaagacttgaattcaggcctcattggagccct |
| | YWKASEGAEYDDQ | actagtatgtagagaagggagtctggccaaggaaaagacacagaccttgcacaaatttatact |
| | TSQREKEDDKVFPG | actttttgctgtatttgatgaagggaaaagttggcactcagaaacaaagaactccttgatgcagg |
| | GSHTYVWQVLKEN | atagggatgctgcatctgctcgggcctggcctaaaatgcacacagtcaatggttatgtaaaca |
| | GPMASDPLCLTYSY | ggtctctgccaggtctgattggatgccacaggaaatcagtctattggcatgtgattggaatggg |
| | LSHVDLVKDLNSG | caccactcctgaagtgcactcaatattcctcgaaggtcacacatttcttgtgaGGAACCA |
| | LIGALLVCREGSLA | TCGCCAGGCTAGCTTGGAAATCTCGCCAATAACTttccttactg |
| | KEKTQTLHKFILLF | ctcaaacactcttgatggaccttggacagtttctactgttttgtcatatctcttcccaccaacatgat |
| | AVFDEGKSWHSET | ggcatggaagcttatgtcaaagtagacagctgtccagaggaaccccaactacgaatgaaaaa |
| | KNSLMQDRDAASA | taatgaagaagcggaagactatgatgatgatcttactgattctgaaatggatgtggtcaggtttg |
| | RAWPKMHTVNGY | atgatgacaactctccttcctttatccaaattcgctcagttgccaagaagcatcctaaaacttggg |
| | VNRSLPGLIGCHRK | tacattacattgctgctgaagaggaggactgggactatgctcccttagtcctcgcccccgatga |
| | SVYWHVIGMGTTP | cagaagttataaaagtcaatatttgaacaatggccctcagcggattggtaggaagtacaaaaa |
| | EVHSIFLEGHTFLV | agtccgatttatggcatacacagatgaaacctttaagactcgtgaagctattcagcatgaatcag |
| | RNHRQASLEISPITF | gaatcttgggacctttactttatggggaagttggagacacactgttgattatatttaagaatcaag |
| | LTAQTLLMDLGQF | caagcagaccatataacatctaccctcacggaatcactgatgtccgtcctttgtattcaaggaga |
| | LLFCHISSHQHDGM | ttaccaaaaggtgtaaaacatttgaaggattttccaattctgccaggagaaatattcaaatataaa |
| | EAYVKVDSCPEEPQ | tggacagtgactgtagaagatgggccaactaaatcagatcctcggtgcctgacccgctattact |
| | LRMKNNEEAEDYD | ctagtttcgttaatatggagagagatctagcttcaggactcattggccctctcctcatctgctaca |
| | DDLTDSEMDVVRF | aagaatctgtagatcaaagaggaaaccagataatgtcagacaagaggaatgtcatcctgttttc |
| | DDDNSPSFIQIRSVA | tgtatttgatgagaaccgaagctggtacctcacagagaatatacaacgctttctccccaatcca |
| | KKHPKTWVHYIAA | gctggagtgcAGCTTGAGGATCCAGAGTTCcaagcctccaacatcatgca |
| | EEEDWDYAPLVLA | cagcatcaatggctatgtttttgatagtttgcagttgtcagtttgtttgcatgaggtggcatactggt |
| | PDDRSYKSQYLNN | acattctaagcattggagcacagactgacttactttctgtcttcttctctggatataccttcaaaca |
| | GPQRIGRKYKKVRF | caaaatggtctatgaagacacactcaccctattcccattctcaggagaaactgtcttcatgtcga |
| | MAYTDETFKTREAI | tggaaaacccaggtctatggattctggggtgccacaactcagactttcggaacagaggcatga |
| | QHESGILGPLLYGE | ccgccttactgaaggtttctagttgtgacaagaacactggtgattattacgaggacagttatgaa |
| | VGDTLLIIFKNQAS | gatatttcagcatacttgctgagtaaaaacaatgccattgaaccaagaagcttctctGGCGC |
| | RPYNIYPHGITDVR | GCCAGGTTCTCCTGCTGGCTCCCCCACCTCAACAGAAGA |
| | PLYSRRLPKGVKHL | GGGGACAAGcgaaagcgctacgcctgagaGTGGCCCTGGCTCTGA |
| | KDFPILPGEIFKYK | GCCAGCCACCTCCGGCTCTGAAACCCCTGCCTCGAGCcaa |
| | WTVTVEDGPTKSD | aacccaccagtcttgaaacgccatcaaGCTgaaataactcgtactacTCTTCAGTC |
| | PRCLTRYYSSFVNM | AGATCAAGAGGAAATCGATTATGATGATACCATATCAGT |
| | ERDLASGLIGPLLIC | TGAAATGAAgaaggaagattttgacatttatgatgaggatgaaaatcagagcccccg |
| | YKESVDQRGNQIM | cagctttcaaaagaaaacacgacactattttattgctgcagtggagaggctctgggattatggg |
| | SDKRNVILFSVFDE | atgagtagctccccacatgttctaagaaacagggctcagagtggcagtgtccctcagttcaag |
| | NRSWYLTENIQRFL | aaagttgttttccaggaatttactgatggctcctttactcagcccttataccgtggagaactaaatg |
| | PNPAGVQLEDPEFQ | aacatttgggactactggggccatatataagagcagaagttgaagataatatcatggtaactttc |
| | ASNIMHSINGYVFD | agaaatcaggcctctcgtccctattccttctattctagccttatttcttatgaggaagatcagaggc |
| | SLQLSVCLHEVAY | aaggagcagaacctagaaaaaactttgtcaagcctaatgaaaccaaaacttacttttggaaagt |
| | WYILSIGAQTDFLS | gcaacatcatatggcacccactaaagatgagtttgactgcaaagcctgggcttatttctctgatg |
| | VFFSGYTFKHKMV | ttgacctggaaaaagatgtgcactcaggcctgattggaccccttctggtctgccacactaacac |
| | YEDTLTLFPFSGET | actgaaccctgctcatgggagacaagtgacagtacaggaatttgctctgtttttcaccatctttga |
| | VFMSMENPGLWIL | TGAGACCAAAAGCTGGTACTTCactgaaaatatggaaagaaactgcagg |
| | GCHNSDFRNRGMT | gctccctgcaatatccagatggaagatcccacttttaaagagaattatcgcttccatgcaatcaa |
| | ALLKVSSCDKNTG | tggctacataatggatacactacctggcttagtaatggctcaggatcaaaggattcgatggtatc |
| | DYYEDSYEDISAYL | tgctcagcatgggcagcaatgaaaacatccattctattcatttcagtggacatgtgttcactgtac |
| | LSKNNAIEPRSFSG | gaaaaaaagaggagtataaaatggcactgtacaatctctatccaggtgtttttgagacagtgga |
| | APGSPAGSPTSTEE | aatgttaccatccaaagctggaatttggcgggtggaatgccttattggcgagcatctacatgct |
| | GTSESATPESGPGS | gggatgagcacactttttctggtgtACAGCAATAAGTGTCAGACTCCcctg |
| | EPATSGSETPASSQ | ggaatggcttctggacacattagagattttcagattacagcttcaggacaatatggacagtggg |
| | NPPVLKRHQAEITR | ccccaaagctggccagacttcattattccggatcaatcaatgcctggagcaccaaggagccct |
| | TTLQSDQEEIDYDD | tttcttggatcaaggtggatctgttggcaccaatgattattcacggcatcaagacccagggtgcc |
| | TISVEMKKEDFDIY | cgtcagaagttctccagcctctacatctctcagtttatcatcatgtatagtcttgatgggaagaagt |
| | DEDENQSPRSFQKK | ggcagacttatcgaggaaattccactggaaccttaatggtcttctttggcaatgtggattcatctg |
| | TRHYFIAAVERLW | ggataaaacacaatatttttaaccctccaattattgctcgatacatccgtttgcacccaactcatta |
| | DYGMSSSPHVLRN | tagcattcgcagcactattcgcatggagttgatgggctgtgatttaaatagttgcagcatgccatt |
| | RAQSGSVPQFKKV | gggaatggagagtaaagcaatatcagatgcacagattactgcttcatcctactttaccaatatgt |
| | VFQEFTDGSFTQPL | ttgccacctggtctccttcaaaagctcgacttcacctccaagggaggagtaatgcctggagac |
| | YRGELNEHLGLLGP | ctcaggtgaataatccaaaagagtggctgcaagtggacttccagaagacaatgaaagtcaca |
| | YIRAEVEDNIMVTF | ggagtaactactcagggagtaaaatctctgcttaccagcatgtatgtgaaggagttcctcatctc |
| | RNQASRPYSFYSSLI | cagcagtcaagatggccatcagtggactctcttttttcagaatggcaaagtaaaggtttttcagg |
| | SYEEDQRQGAEPR | gaaatcaagactccttcacacctgtggtgaactctctagacccaccgttactgactcgctacctt |
| | KNFVKPNETKTYF | cgaattcacccccagagttgggtgcaccagattgccctgaggatggaggttctgggctgcga |
| | WKVQHHMAPTKD | ggcacaggacctctacggcgccggatcacctggggccgaaacggccgaacaaaaactcat |
| | EFDCKAWAYFSDV | ctcagaagaggatctgtcacctgcaaccggttga |
| | DLEKDVHSGLIGPL | |
| | LVCHTNTLNPAHG | |
| | RQVTVQEFALFFTI | |
| | FDETKSWYFTENM | |
| | ERNCRAPCNIQME | |
| | DPTFKENYRFHAIN | |
| | GYIMDTLPGLVMA | |
| | QDQRIRWYLLSMG | |
| | SNENIHSIHFSGHVF | |
| | TVRKKEEYKMALY | |
| | NLYPGVFETVEMLP | |
| | SKAGIWRVECLIGE | |
| | HLHAGMSTLFLVY | |
| | SNKCQTPLGMASG | |
| | HIRDFQITASGQYG | |
| | QWAPKLARLHYSG | |
| | SINAWSTKEPFSWI | |
| | KVDLLAPMIIHGIK | |
| | TQGARQKFSSLYIS | |
| | QFIIMYSLDGKKW | |
| | QTYRGNSTGTLMV | |
| | FFGNVDSSGIKHNIF | |
| | NPPIIARYIRLHPTH | |
| | YSIRSTLRMELMGC | |
| | DLNSCSMPLGMES | |
| | KAISDAQITASSYFT | |
| | NMFATWSPSKARL | |
| | HLQGRSNAWRPQV | |
| | NNPKEWLQVDFQK | |
| | TMKVTGVTTQGVK | |
| | SLLTSMYVKEFLISS | |
| | SQDGHQWTLFFQN | |
| | GKVKVFQGNQDSF | |
| | TPVVNSLDPPLLTR | |
| | YLRIHPQSWVHQIA | |
| | LRMEVLGCEAQDL | |
| | YGAGSPGAETAEQ | |
| | KLISEEDLSPATG | |
| pBC0136 | MQIELSTCFFLCLLRF | ATGCAAATAGAGCTCTCCACCTGCTTCTTTCTGTGCCTTTTGCG |
| | CFSATRRYYLGAVEL | ATTCTGCTTTAGTGCCACCAGAAGATACTACCTGGGTGCAGTG |
| | SWDYMQSDLGELPV | GAACTGTCATGGGACTATATGCAAAGTGATCTCGGTGAGCTGC |
| | DARFPPRVPKSFPFNT | CTGTGGACGCAAGATTTCCTCCTAGAGTGCCAAAATCTTTTCC |
| | SVVYKKTLFVEFTDH | ATTCAACACCTCAGTCGTGTACAAAAAGACTCTGTTTGTAGAA |
| | LFNIAKPRPPWMGLL | TTCACGGATCACCTTTTCAACATCGCTAAGCCAAGGCCACCCT |
| | GPTIQAEVYDTVVITL | GGATGGGTCTGCTAGGTCCTACCATCCAGGCTGAGGTTTATGA |
| | KNMASHPVSLHAVG | TACAGTGGTCATTACACTTAAGAACATGGCTTCCCATCCTGTC |
| | VSYWKASEGAEYDD | AGTCTTCATGCTGTTGGTGTATCCTACTGGAAAGCTTCTGAGG |
| | QTSQREKEDDKVFPG | GAGCTGAATATGATGATCAGACCAGTCAAAGGGAGAAAGAAG |
| | GSHTYVWQVLKENG | ATGATAAAGTCTTCCCTGGTGGAAGCCATACATATGTCTGGCA |
| | PMASDPLCLTYSYLS | GGTCCTGAAAGAGAATGGTCCAATGGCCTCTGACCCACTGTGC |
| | HVDLVKDLNSGLIGA | CTTACCTACTCATATCTTTCTCATGTGGACCTGGTAAAAGACTT |
| | LLVCREGSLAKEKTQ | GAATTCAGGCCTCATTGGAGCCCTACTAGTATGTAGAGAAGGG |
| | TLHKFILLFAVFDEGK | AGTCTGGCCAAGGAAAAGACACAGACCTTGCACAAATTTATA |
| | SWHSETKNSLMQDR | CTACTTTTTGCTGTATTTGATGAAGGGAAAAGTTGGCACTCAG |
| | DAASARAWPKMHTV | AAACAAAGAACTCCTTGATGCAGGATAGGGATGCTGCATCTG |
| | NGYVNRSLPGLIGCH | CTCGGGCCTGGCCTAAAATGCACACAGTCAATGGTTATGTAAA |
| | RKSVYWHVIGMGTT | CAGGTCTCTGCCAGGTCTGATTGGATGCCACAGGAAATCAGTC |
| | PEVHSIFLEGHTFLVR | TATTGGCATGTGATTGGAATGGGCACCACTCCTGAAGTGCACT |
| | NHRQASLEISPITFLT | CAATATTCCTCGAAGGTCACACATTTCTTGTGAGGAACCATCG |
| | AQTLLMDLGQFLLFC | CCAGGCTAGCTTGGAAATCTCGCCAATAACTTTCCTTACTGCT |
| | HISSHQHDGMEAYVK | CAAACACTCTTGATGGACCTTGGACAGTTTCTACTGTTTTGTCA |
| | VDSCPEEPQLRMKNN | TATCTCTTCCCACCAACATGATGGCATGGAAGCTTATGTCAAA |
| | EEAEDYDDDLTDSEM | GTAGACAGCTGTCCAGAGGAACCCCAACTACGAATGAAAAAT |
| | DVVRFDDDNSPSFIQI | AATGAAGAAGCGGAAGACTATGATGATGATCTTACTGATTCTG |
| | RSVAKKHPKTWVHYI | AAATGGATGTGGTCAGGTTTGATGATGACAACTCTCCTTCCTT |
| | AAEEEDWDYAPLVL | TATCCAAATTCGCTCAGTTGCCAAGAAGCATCCTAAAACTTGG |
| | APDDRSYKSQYLNNG | GTACATTACATTGCTGCTGAAGAGGAGGACTGGGACTATGCTC |
| | PQRIGRKYKKVRFMA | CCTTAGTCCTCGCCCCCGATGACAGAAGTTATAAAAGTCAATA |
| | YTDETFKTREAIQHES | TTTGAACAATGGCCCTCAGCGGATTGGTAGGAAGTACAAAAA |
| | GILGPLLYGEVGDTL | AGTCCGATTTATGGCATACACAGATGAAACCTTTAAGACTCGT |
| | LIIFKNQASRPYNIYP | GAAGCTATTCAGCATGAATCAGGAATCTTGGGACCTTTACTTT |
| | HGITDVRPLYSRRLPK | ATGGGGAAGTTGGAGACACACTGTTGATTATATTTAAGAATCA |
| | GVKHLKDFPILPGEIF | AGCAAGCAGACCATATAACATCTACCCTCACGGAATCACTGAT |
| | KYKWTVTVEDGPTK | GTCCGTCCTTTGTATTCAAGGAGATTACCAAAAGGTGTAAAAC |
| | SDPRCLTRYYSSFVN | ATTTGAAGGATTTTCCAATTCTGCCAGGAGAAATATTCAAATA |
| | MERDLASGLIGPLLIC | TAAATGGACAGTGACTGTAGAAGATGGGCCAACTAAATCAGA |
| | YKESVDQRGNQIMSD | TCCTCGGTGCCTGACCCGCTATTACTCTAGTTTCGTTAATATGG |
| | KRNVILFSVFDENRS | AGAGAGATCTAGCTTCAGGACTCATTGGCCCTCTCCTCATCTG |
| | WYLTENIQRFLPNPA | CTACAAAGAATCTGTAGATCAAAGAGGAAACCAGATAATGTC |
| | GVQLEDPEFQASNIM | AGACAAGAGGAATGTCATCCTGTTTTCTGTATTTGATGAGAAC |
| | HSINGYVFDSLQLSV | CGAAGCTGGTACCTCACAGAGAATATACAACGCTTTCTCCCCA |
| | CLHEVAYWYILSIGA | ATCCAGCTGGAGTGCAGCTTGAGGATCCAGAGTTCCAAGCCTC |
| | QTDFLSVFFSGYTFK | CAACATCATGCACAGCATCAATGGCTATGTTTTTGATAGTTTG |
| | HKMVYEDTLTLFPFS | CAGTTGTCAGTTTGTTTGCATGAGGTGGCATACTGGTACATTCT |
| | GETVFMSMENPGLWI | AAGCATTGGAGCACAGACTGACTTCCTTTCTGTCTTCTTCTCTG |
| | LGCHNSDFRNRGMT | GATATACCTTCAAACACAAAATGGTCTATGAAGACACACTCAC |
| | ALLKVSSCDKNTGDY | CCTATTCCCATTCTCAGGAGAAACTGTCTTCATGTCGATGGAA |
| | YEDSYEDISAYLLSK | AACCCAGGTCTATGGATTCTGGGGTGCCACAACTCAGACTTTC |
| | NNAIEPRSFSQNGAPG | GGAACAGAGGCATGACCGCCTTACTGAAGGTTTCTAGTTGTGA |
| | TSESATPESGPGSEPA | CAAGAACACTGGTGATTATTACGAGGACAGTTATGAAGATATT |
| | TSGSETPGTSESATPE | TCAGCATACTTGCTGAGTAAAAACAATGCCATTGAACCAAGA |
| | SGPGSEPATSGSETPG | AGCTTCTCTCAAAACGGCGCGCCAGGTACCTCAGAGTCTGCTA |
| | TSESATPESGPGTSTE | CCCCCGAGTCAGGGCCAGGATCAGAGCCAGCCACCTCCGGGT |
| | PSEGSAPGSPAGSPTS | CTGAGACACCCGGGACTTCCGAGAGTGCCACCCCTGAGTCCGG |
| | TEEGTSESATPESGPG | ACCCGGGTCCGAGCCCGCCACTTCCGGCTCCGAAACTCCCGGC |
| | SEPATSGSETPGTSES | ACAAGCGAGAGCGCTACCCCAGAGTCAGGACCAGGAACATCT |
| | ATPESGPGSPAGSPTS | ACAGAGCCCTCTGAAGGCTCCGCTCCAGGGTCCCCAGCCGGCA |
| | TEEGSPAGSPTSTEEG | GTCCCACTAGCACCGAGGAGGGAACCTCTGAAAGCGCCACAC |
| | TSTEPSEGSAPGTSES | CCGAATCAGGGCCAGGGTCTGAGCCTGCTACCAGCGGCAGCG |
| | ATPESGPGTSESATPE | AGACACCAGGCACCTCTGAGTCCGCCACACCAGAGTCCGGAC |
| | SGPGTSESATPESGPG | CCGGATCTCCCGCTGGGAGCCCCACCTCCACTGAGGAGGGATC |
| | SEPATSGSETPGSEPA | TCCTGCTGGCTCTCCAACATCTACTGAGGAAGGTACCTCAACC |
| | TSGSETPGSPAGSPTS | GAGCCATCCGAGGGATCAGCTCCCGGCACCTCAGAGTCGGCA |
| | TEEGTSTEPSEGSAPG | ACCCCGGAGTCTGGACCCGGAACTTCCGAAAGTGCCACACCA |
| | TSTEPSEGSAPGSEPA | GAGTCCGGTCCCGGGACTTCAGAATCAGCAACACCCGAGTCC |
| | TSGSETPGTSESATPE | GGCCCTGGGTCTGAACCCGCCACAAGTGGTAGTGAGACACCA |
| | SGPGTSTEPSEGSAPA | GGATCAGAACCTGCTACCTCAGGGTCAGAGACACCCGGATCTC |
| | SSPPVLKRHQREITRT | CGGCAGGCTCACCAACCTCCACTGAGGAGGGCACCAGCACAG |
| | TLQSDQEEIDYDDTIS | AACCAAGCGAGGGCTCCGCACCCGGAACAAGCACTGAACCCA |
| | VEMKKEDFDIYDEDE | GTGAGGGTTCAGCACCCGGCTCTGAGCCGGCCACAAGTGGCA |
| | NQSPRSFQKKTRHYFI | GTGAGACACCCGGCACTTCAGAGAGTGCCACCCCCGAGAGTG |
| | AAVERLWDYGMSSS | GCCCAGGCACTAGTACCGAGCCCTCTGAAGGCAGTGCGCCAG |
| | PHVLRNRAQSGSVPQ | CCTCGAGCCCACCAGTCTTGAAACGCCATCAACGGGAAATAA |
| | FKKVVFQEFTDGSFT | CTCGTACTACTCTTCAGTCAGATCAAGAGGAAATCGATTATGA |
| | QPLYRGELNEHLGLL | TGATACCATATCAGTTGAAATGAAGAAGGAAGATTTTGACATT |
| | GPYIRAEVEDNIMVT | TATGATGAGGATGAAAATCAGAGCCCCCGCAGCTTTCAAAAG |
| | FRNQASRPYSFYSSLI | AAAACACGACACTATTTTATTGCTGCAGTGGAGAGGCTCTGGG |
| | SYEEDQRQGAEPRKN | ATTATGGGATGAGTAGCTCCCCACATGTTCTAAGAAACAGGGC |
| | FVKPNETKTYFWKV | TCAGAGTGGCAGTGTCCCTCAGTTCAAGAAAGTTGTTTTCCAG |
| | QHHMAPTKDEFDCK | GAATTTACTGATGGCTCCTTTACTCAGCCCTTATACCGTGGAG |
| | AWAYFSDVDLEKDV | AACTAAATGAACATTTGGGACTCCTGGGGCCATATATAAGAGC |
| | HSGLIGPLLVCHTNTL | AGAAGTTGAAGATAATATCATGGTAACTTTCAGAAATCAGGCC |
| | NPAHGRQVTVQEFAL | TCTCGTCCCTATTCCTTCTATTCTAGCCTTATTTCTTATGAGGA |
| | FFTIFDETKSWYFTEN | AGATCAGAGGCAAGGAGCAGAACCTAGAAAAAACTTTGTCAA |
| | MERNCRAPCNIQMED | GCCTAATGAAACCAAAACTTACTTTTGGAAAGTGCAACATCAT |
| | PTFKENYRFHAINGYI | ATGGCACCCACTAAAGATGAGTTTGACTGCAAAGCCTGGGCTT |
| | MDTLPGLVMAQDQR | ATTTCTCTGATGTTGACCTGGAAAAAGATGTGCACTCAGGCCT |
| | IRWYLLSMGSNENIH | GATTGGACCCCTTCTGGTCTGCCACACTAACACACTGAACCCT |
| | SIHFSGHVFTVRKKEE | GCTCATGGGAGACAAGTGACAGTACAGGAATTTGCTCTGTTTT |
| | YKMALYNLYPGVFE | TCACCATCTTTGATGAGACCAAAAGCTGGTACTTCACTGAAAA |
| | TVEMLPSKAGIWRVE | TATGGAAAGAAACTGCAGGGCTCCCTGCAATATCCAGATGGA |
| | CLIGEHLHAGMSTLF | AGATCCCACTTTTAAAGAGAATTATCGCTTCCATGCAATCAAT |
| | LVYSNKCQTPLGMAS | GGCTACATAATGGATACACTACCTGGCTTAGTAATGGCTCAGG |
| | GHIRDFQITASGQYG | ATCAAAGGATTCGATGGTATCTGCTCAGCATGGGCAGCAATGA |
| | QWAPKLARLHYSGSI | AAACATCCATTCTATTCATTTCAGTGGACATGTGTTCACTGTAC |
| | NAWSTKEPFSWIKVD | GAAAAAAAGAGGAGTATAAAATGGCACTGTACAATCTCTATC |
| | LLAPMIIHGIKTQGAR | CAGGTGTTTTTGAGACAGTGGAAATGTTACCATCCAAAGCTGG |
| | QKFSSLYISQFIIMYSL | AATTTGGCGGGTGGAATGCCTTATTGGCGAGCATCTACATGCT |
| | DGKKWQTYRGNSTG | GGGATGAGCACACTTTTTCTGGTGTACAGCAATAAGTGTCAGA |
| | TLMVFFGNVDSSGIK | CTCCCCTGGGAATGGCTTCTGGACACATTAGAGATTTTCAGAT |
| | HNIFNPPIIARYIRLHP | TACAGCTTCAGGACAATATGGACAGTGGGCCCCAAAGCTGGC |
| | THYSIRSTLRMELMG | CAGACTTCATTATTCCGGATCAATCAATGCCTGGAGCACCAAG |
| | CDLNSCSMPLGMESK | GAGCCCTTTTCTTGGATCAAGGTGGATCTGTTGGCACCAATGA |
| | AISDAQITASSYFTNM | TTATTCACGGCATCAAGACCCAGGGTGCCCGTCAGAAGTTCTC |
| | FATWSPSKARLHLQG | CAGCCTCTACATCTCTCAGTTTATCATCATGTATAGTCTTGATG |
| | RSNAWRPQVNNPKE | GGAAGAAGTGGCAGACTTATCGAGGAAATTCCACTGGAACCT |
| | WLQVDFQKTMKVTG | TAATGGTCTTCTTTGGCAATGTGGATTCATCTGGGATAAAACA |
| | VTTQGVKSLLTSMYV | CAATATTTTTAACCCTCCAATTATTGCTCGATACATCCGTTTGC |
| | KEFLISSSQDGHQWT | ACCCAACTCATTATAGCATTCGCAGCACTCTTCGCATGGAGTT |
| | LFFQNGKVKVFQGN | GATGGGCTGTGATTTAAATAGTTGCAGCATGCCATTGGGAATG |
| | QDSFTPVVNSLDPPLL | GAGAGTAAAGCAATATCAGATGCACAGATTACTGCTTCATCCT |
| | TRYLRIHPQSWVHQI | ACTTTACCAATATGTTTGCCACCTGGTCTCCTTCAAAAGCTCGA |
| | ALRMEVLGCEAQDL | CTTCACCTCCAAGGGAGGAGTAATGCCTGGAGACCTCAGGTG |
| | YGAGSPGAETAEQKL | AATAATCCAAAAGAGTGGCTGCAAGTGGACTTCCAGAAGACA |
| | ISEEDLSPATG | ATGAAAGTCACAGGAGTAACTACTCAGGGAGTAAAATCTCTG |
| | | CTTACCAGCATGTATGTGAAGGAGTTCCTCATCTCCAGCAGTC |
| | | AAGATGGCCATCAGTGGACTCTCTTTTTTCAGAATGGCAAAGT |
| | | AAAGGTTTTTCAGGGAAATCAAGACTCCTTCACACCTGTGGTG |
| | | AACTCTCTAGACCCACCGTTACTGACTCGCTACCTTCGAATTC |
| | | ACCCCCAGAGTTGGGTGCACCAGATTGCCCTGAGGATGGAGG |
| | | TTCTGGGCTGCGAGGCACAGGACCTCTACGGCGCCGGATCACC |
| | | TGGGGCCGAAACGGCCGAACAAAAACTCATCTCAGAAGAGGA |
| | | TCTGTCACCTGCAACCGGTTGA |
| pBC0136- | MQIELSTCFFLCLL | atgcaaatagagctctccacctgcttctttctgtgccttttgcgattctgctttagtgccaccagaa |
| 2 | RFCFSATRRYYLGA | gatactacctgggtgcagtggaactgtcatgggactatatgcaaagtgatctcggtgagctgc |
| | VELSWDYMQSDLG | ctgtggacgcaagatttcctcctagagtgccaaaatcttttccattcaacacctcagtcgtgtaca |
| | ELPVDARFPPRVPK | aaaagactctgtttgtagaattcacggatcaccttttcaacatcgctaagccaaggccaccctg |
| | SFPFNTSVVYKKTL | gatgggtctgctaggtcctaccatccaggctgaggtttatgatacagtggtcattacacttaaga |
| | FVEFTDHLFNIAKP | acatggcttcccatcctgtcagtcttcatgctgttggtgtatcctactggaaagcttctgagggag |
| | RPPWMGLLGPTIQA | ctgaatatgatgatcagaccagtcaaagggagaaagaagatgataaagtcttccctggtggaa |
| | EVYDTVVITLKNM | gccatacatatgtctggcaggtcctgaaagagaatggtccaatggcctctgacccactgtgcct |
| | ASHPVSLHAVGVS | tacctactcatatctttctcatgtggacctggtaaaagacttgaattcaggcctcattggagccct |
| | YWKASEGAEYDDQ | actagtatgtagagaagggagtctggccaaggaaaagacacagaccttgcacaaatttatact |
| | TSQREKEDDKVFPG | actttttgctgtatttgatgaagggaaaagttggcactcagaaacaaagaactccttgatgcagg |
| | GSHTYVWQVLKEN | atagggatgctgcatctgctcgggcctggcctaaaatgcacacagtcaatggttatgtaaaca |
| | GPMASDPLCLTYSY | ggtctctgccaggtctgattggatgccacaggaaatcagtctattggcatgtgattggaatggg |
| | LSHVDLVKDLNSG | caccactcctgaagtgcactcaatattcctcgaaggtcacacatttcttgtgaGGAACCA |
| | LIGALLVCREGSLA | TCGCCAGGCTAGCTTGGAAATCTCGCCAATAACTttccttactg |
| | KEKTQTLHKFILLF | ctcaaacactcttgatggaccttggacagtttctactgttttgtcatatctcttcccaccaacatgat |
| | AVFDEGKSWHSET | ggcatggaagcttatgtcaaagtagacagctgtccagaggaaccccaactacgaatgaaaaa |
| | KNSLMQDRDAASA | taatgaagaagcaggaagactatgatgatgatcttactgattctgaaatggatgtggtcaggtttg |
| | RAWPKMHTVNGY | atgatgacaactctccttcctttatccaaattcgctcagttgccaagaagcatcctaaaacttggg |
| | VNRSLPGLIGCHRK | tacattacattgctgctgaagaggaggactgggactatgctcccttagtcctcgcccccgatga |
| | SVYWHVIGMGTTP | cagaagttataaaagtcaatatttgaacaatggccctcagcggattggtaggaagtacaaaaa |
| | EVHSIFLEGHTFLV | agtccgatttatggcatacacagatgaaacctttaagactcgtgaagctattcagcatgaatcag |
| | RNHRQASLEISPITF | gaatcttgggacctttactttatggggaagttggagacacactgttgattatatttaagaatcaag |
| | LTAQTLLMDLGQF | caagcagaccatataacatctaccctcacggaatcactgatgtccgtcctttgtattcaaggaga |
| | LLFCHISSHQHDGM | ttaccaaaaggtgtaaaacatttgaaggattttccaattctgccaggagaaatattcaaatataaa |
| | EAYVKVDSCPEEPQ | tggacagtgactgtagaagatgggccaactaaatcagatcctcggtgcctgacccgctattact |
| | LRMKNNEEAEDYD | ctagtttcgttaatatggagagagatctagcttcaggactcattggccctctcctcatctgctaca |
| | DDLTDSEMDVVRF | aagaatctgtagatcaaagaggaaaccagataatgtcagacaagaggaatgtcatcctgttttc |
| | DDDNSPSFIQIRSVA | tgtatttgatgagaaccgaagctggtacctcacagagaatatacaacgctttctccccaatcca |
| | KKHPKTWVHYIAA | gctggagtgcAGCTTGAGGATCCAGAGTTCcaagcctccaacatcatgca |
| | EEEDWDYAPLVLA | cagaatcaatggctatgtttttgatagtttgcagttgtcagtttgtttgcatgaggtggcatactggt |
| | PDDRSYKSQYLNN | acattctaagcattggagcacagactgacttcctttctgtcttcttctctggatataccttcaaaca |
| | GPQRIGRKYKKVRF | caaaatggtctatgaagacacactcaccctattcccattctcaggagaaactgtcttcatgtcga |
| | MAYTDETFKTREAI | tggaaaacccaggtctatggattctggggtgccacaactcagactttcggaacagaggcatga |
| | QHESGILGPLLYGE | ccgccttactgaaggtttctagttgtgacaagaacactggtgattattacgaggacagttatgaa |
| | VGDTLLIIFKNQAS | gatatttcagcatacttgctgagtaaaaacaatgccattgaaccaagaagcttctctGGCGC |
| | RPYNIYPHGITDVR | GCCAggtacctcagagtctgctaccCCCGAGTCAGGGCCAGGATCAG |
| | PLYSRRLPKGVKHL | AGCCAGCCACCTCCGGGTCTGAGACACCCGGGACTTCCG |
| | KDFPILPGEIFKYK | AGAGTGCCACCCCTGAGTCCGGACCCGGGTCCGAGCCC |
| | WTVTVEDGPTKSD | GCCACTTCCGGCTCCGAAACTCCCGGCACAAGCGAGAG |
| | PRCLTRYYSSFVNM | CGCTACCCCAGAGTCAGGACCAGGAACATCTACAGAGC |
| | ERDLASGLIGPLLIC | CCTCTGAAGGCTCCGCTCCAGGGTCCCCAGCCGGCAGTC |
| | YKESVDQRGNQIM | CCACTAGCACCGAGGAGGGAACCTCTGAAAGCGCCACA |
| | SDKRNVILFSVFDE | CCCGAATCAGGGCCAGGGTCTGAGCCTGCTACCAGCGGC |
| | NRSWYLTENIQRFL | AGCGAGACACCAGGCACCTCTGAGTCCGCCACACCAGA |
| | PNPAGVQLEDPEFQ | GTCCGGACCCGGATCTCCCGCTGGGAGCCCCACCTCCAC |
| | ASNIMHSINGYVFD | TGAGGAGGGATCTCCTGCTGGCTCTCCAACATCTACTGA |
| | SLQLSVCLHEVAY | GGAAGGTACCTCAACCGAGCCATCCGAGGGATCAGCTC |
| | WYILSIGAQTDFLS | CCGGCACCTCAGAGTCGGCAACCCCGGAGTCTGGACCC |
| | VFFSGYTFKHKMV | GGAACTTCCGAAAGTGCCACACCAGAGTCCGGTCCCGG |
| | YEDTLTLFPFSGET | GACTTCAGAATCAGCAACACCCGAGTCCGGCCCTGGGTC |
| | VFMSMENPGLWIL | TGAACCCGCCACAAGTGGTAGTGAGACACCAGGATCAG |
| | GCHNSDFRNRGMT | AACCTGCTACCTCAGGGTCAGAGACACCCGGATCTCCGG |
| | ALLKVSSCDKNTG | CAGGCTCACCAACCTCCACTGAGGAGGGCACCAGCACA |
| | DYYEDSYEDISAYL | GAACCAAGCGAGGGCTCCGCACCCGGAACAAGCACTGA |
| | LSKNNAIEPRSFSG | ACCCAGTGAGGGTTCAGCACCCGGCTCTGAGCCGGCCAC |
| | APGTSESATPESGP | AAGTGGCAGTGAGACACCCGGCACTTCAGAGAGTGCCA |
| | GSEPATSGSETPGT | CCCCCGAGAGTGGCCCAGGCACTAGTACCGAGCCCTCTg |
| | SESATPESGPGSEPA | aaggcagtgcgccaGCCTCGAGCcaaaacccaccagtcttgaaacgccatcaacgg |
| | TSGSETPGTSESATP | gaaataactcgtactacTCTTCAGTCAGATCAAGAGGAAATCGATT |
| | ESGPGTSTEPSEGS | ATGATGATACCATATCAGTTGAAATGAAgaaggaagattttgacat |
| | APGSPAGSPTSTEE | ttatgatgaggatgaaaatcagagcccccgcagctttcaaaagaaaacacgacactattttatt |
| | GTSESATPESGPGS | gctgcagtggagaggctctgggattatgggatgagtagctccccacatgttctaagaaacagg |
| | EPATSGSETPGTSES | gctcagagtggcagtgtccctcagttcaagaaagttgttttccaggaatttactgatggctccttt |
| | ATPESGPGSPAGSP | actcagcccttataccgtggagaactaaatgaacatttgggactcctggggccatatataagag |
| | TSTEEGSPAGSPTST | cagaagttgaagataatatcatggtaactttcagaaatcaggcctctcgtccctattccttctattc |
| | EEGTSTEPSEGSAP | tagccttatttcttatgaggaagatcagaggcaaggagcagaacctagaaaaaactttgtcaag |
| | GTSESATPESGPGT | cctaatgaaaccaaaacttacttttggaaagtgcaacatcatatggcacccactaaagatgagtt |
| | SESATPESGPGTSES | tgactgcaaagcctgggcttatttctctgatgttgacctggaaaaagatgtgcactcaggcctga |
| | ATPESGPGSEPATS | ttggaccccttctggtctgccacactaacacactgaaccctgctcatgggagacaagtgacag |
| | GSETPGSEPATSGS | tacaggaatttgctctgtttttcaccatctttgaTGAGACCAAAAGCTGGTACT |
| | ETPGSPAGSPTSTEE | TCactgaaaatatggaaagaaactgcagggctccctgcaatatccagatggaagatcccact |
| | GTSTEPSEGSAPGT | tttaaagagaattatcgcttccatgcaatcaatggctacataatggatacactacctggcttagta |
| | STEPSEGSAPGSEPA | atggctcaggatcaaaggattcgatggtatctgctcagcatgggcagcaatgaaaacatccatt |
| | TSGSETPGTSESATP | ctattcatttcagtggacatgtgttcactgtacgaaaaaaagaggagtataaaatggcactgtac |
| | ESGPGTSTEPSEGS | aatctctatccaggtgtttttgagacagtggaaatgttaccatccaaagctggaatttggcgggt |
| | APASSQNPPVLKRH | ggaatgccttattggcgagcatctacatgctgggatgagcacactttttctggtgtACAGC |
| | QREITRTTLQSDQE | AATAAGTGTCAGACTCCcctgggaatggcttctggacacattagagattttcag |
| | EIDYDDTISVEMKK | attacagcttcaggacaatatggacagtgggccccaaagctggccagacttcattattccggat |
| | EDFDIYDEDENQSP | caatcaatgcctggagcaccaaggagcccttttcttggatcaaggtggatctgttggcaccaat |
| | RSFQKKTRHYFIAA | gattattcacggcatcaagacccagggtgcccgtcagaagttctccagcctctacatctctcag |
| | VERLWDYGMSSSP | tttatcatcatgtatagtcttgatgggaagaagtggcagacttatcgaggaaattccactggaac |
| | HVLRNRAQSGSVP | cttaatggtcttctttggcaatgtggattcatctgggataaaacacaatatttttaaccctccaatta |
| | QFKKVVFQEFTDGS | ttgctcgatacatccgtttgcacccaactcattatagcattcgcagcactcttcgcatggagttga |
| | FTQPLYRGELNEHL | tgggctgtgatttaaatagttgcagcatgccattgggaatggagagtaaagcaatatcagatgc |
| | GLLGPYIRAEVEDN | acagattactgcttcatcctactttaccaatatgtttgccacctggtctccttcaaaagctcgacttc |
| | IMVTFRNQASRPYS | acctccaagggaggagtaatgcctggagacctcaggtgaataatccaaaagagtggctgca |
| | FYSSLISYEEDQRQ | agtggacttccagaagacaatgaaagtcacaggagtaactactcagggagtaaaatctctgct |
| | GAEPRKNFVKPNET | taccagcatgtatgtgaaggagttcctcatctccagcagtcaagatggccatcagtggactctc |
| | KTYFWKVQHHMA | ttttttcagaatggcaaagtaaaggtttttcagggaaatcaagactccttcacacctgtggtgaac |
| | PTKDEFDCKAWAY | tctctagacccaccgttactgactcgctaccttcgaattcacccccagagttgggtgcaccaga |
| | FSDVDLEKDVHSG | ttgccctgaggatggaggttctgggctgcgaggcacaggacctctacggcgccggatcacct |
| | LIGPLLVCHTNTLN | ggggccgaaacggccgaacaaaaactcatctcagaagaggatctgtcacctgcaaccggtt |
| | PAHGRQVTVQEFA | ga |
| | LFFTIFDETKSWYF | |
| | TENMERNCRAPCNI | |
| | QMEDPTFKENYRF | |
| | HAINGYIMDTLPGL | |
| | VMAQDQRIRWYLL | |
| | SMGSNENIHSIHFS | |
| | GHVFTVRKKEEYK | |
| | MALYNLYPGVFET | |
| | VEMLPSKAGIWRV | |
| | ECLIGEHLHAGMST | |
| | LFLVYSNKCQTPLG | |
| | MASGHIRDFQITAS | |
| | GQYGQWAPKLARL | |
| | HYSGSINAWSTKEP | |
| | FSWIKVDLLAPMII | |
| | HGIKTQGARQKFSS | |
| | LYISQFIIMYSLDGK | |
| | KWQTYRGNSTGTL | |
| | MVFFGNVDSSGIKH | |
| | NIFNPPIIARYIRLHP | |
| | THYSIRSTLRMELM | |
| | GCDLNSCSMPLGM | |
| | ESKAISDAQITASSY | |
| | FTNMFATWSPSKA | |
| | RLHLQGRSNAWRP | |
| | QVNNPKEWLQVDF | |
| | QKTMKVTGVTTQG | |
| | VKSLLTSMYVKEFL | |
| | ISSSQDGHQWTLFF | |
| | QNGKVKVFQGNQD | |
| | SFTPVVNSLDPPLL | |
| | TRYLRIHPQSWVH | |
| | QIALRMEVLGCEA | |
| | QDLYGAGSPGAET | |
| | AEQKLISEEDLSPA | |
| | TG | |
| pBC0137 | MQIELSTCFFLCLLRF | ATGCAAATAGAGCTCTCCACCTGCTTCTTTCTGTGCCTTTTGCG |
| | CFSATRRYYLGAVEL | ATTCTGCTTTAGTGCCACCAGAAGATACTACCTGGGTGCAGTG |
| | SWDYMQSDLGELPV | GAACTGTCATGGGACTATATGCAAAGTGATCTCGGTGAGCTGC |
| | DARFPPRVPKSFPFNT | CTGTGGACGCAAGATTTCCTCCTAGAGTGCCAAAATCTTTTCC |
| | SVVYKKTLFVEFTDH | ATTCAACACCTCAGTCGTGTACAAAAAGACTCTGTTTGTAGAA |
| | LFNIAKPRPPWMGLL | TTCACGGATCACCTTTTCAACATCGCTAAGCCAAGGCCACCCT |
| | GPTIQAEVYDTVVITL | GGATGGGTCTGCTAGGTCCTACCATCCAGGCTGAGGTTTATGA |
| | KNMASHPVSLHAVG | TACAGTGGTCATTACACTTAAGAACATGGCTTCCCATCCTGTC |
| | VSYWKASEGAEYDD | AGTCTTCATGCTGTTGGTGTATCCTACTGGAAAGCTTCTGAGG |
| | QTSQREKEDDKVFPG | GAGCTGAATATGATGATCAGACCAGTCAAAGGGAGAAAGAAG |
| | GSHTYVWQVLKENG | ATGATAAAGTCTTCCCTGGTGGAAGCCATACATATGTCTGGCA |
| | PMASDPLCLTYSYLS | GGTCCTGAAAGAGAATGGTCCAATGGCCTCTGACCCACTGTGC |
| | HVDLVKDLNSGLIGA | CTTACCTACTCATATCTTTCTCATGTGGACCTGGTAAAAGACTT |
| | LLVCREGSLAKEKTQ | GAATTCAGGCCTCATTGGAGCCCTACTAGTATGTAGAGAAGGG |
| | TLHKFILLFAVFDEGK | AGTCTGGCCAAGGAAAAGACACAGACCTTGCACAAATTTATA |
| | SWHSETKNSLMQDR | CTACTTTTTGCTGTATTTGATGAAGGGAAAAGTTGGCACTCAG |
| | DAASARAWPKMHTV | AAACAAAGAACTCCTTGATGCAGGATAGGGATGCTGCATCTG |
| | NGYVNRSLPGLIGCH | CTCGGGCCTGGCCTAAAATGCACACAGTCAATGGTTATGTAAA |
| | RKSVYWHVIGMGTT | CAGGTCTCTGCCAGGTCTGATTGGATGCCACAGGAAATCAGTC |
| | PEVHSIFLEGHTFLVR | TATTGGCATGTGATTGGAATGGGCACCACTCCTGAAGTGCACT |
| | NHRQASLEISPITFLT | CAATATTCCTCGAAGGTCACACATTTCTTGTGAGGAACCATCG |
| | AQTLLMDLGQFLLFC | CCAGGCTAGCTTGGAAATCTCGCCAATAACTTTCCTTACTGCT |
| | HISSHQHDGMEAYVK | CAAACACTCTTGATGGACCTTGGACAGTTTCTACTGTTTTGTCA |
| | VDSCPEEPQLRMKNN | TATCTCTTCCCACCAACATGATGGCATGGAAGCTTATGTCAAA |
| | EEAEDYDDDLTDSEM | GTAGACAGCTGTCCAGAGGAACCCCAACTACGAATGAAAAAT |
| | DVVRFDDDNSPSFIQI | AATGAAGAAGCGGAAGACTATGATGATGATCTTACTGATTCTG |
| | RSVAKKHPKTWVHYI | AAATGGATGTGGTCAGGTTTGATGATGACAACTCTCCTTCCTT |
| | AAEEEDWDYAPLVL | TATCCAAATTCGCTCAGTTGCCAAGAAGCATCCTAAAACTTGG |
| | APDDRSYKSQYLNNG | GTACATTACATTGCTGCTGAAGAGGAGGACTGGGACTATGCTC |
| | PQRIGRKYKKVRFMA | CCTTAGTCCTCGCCCCCGATGACAGAAGTTATAAAAGTCAATA |
| | YTDETFKTREAIQHES | TTTGAACAATGGCCCTCAGCGGATTGGTAGGAAGTACAAAAA |
| | GILGPLLYGEVGDTL | AGTCCGATTTATGGCATACACAGATGAAACCTTTAAGACTCGT |
| | LIIFKNQASRPYNIYP | GAAGCTATTCAGCATGAATCAGGAATCTTGGGACCTTTACTTT |
| | HGITDVRPLYSRRLPK | ATGGGGAAGTTGGAGACACACTGTTGATTATATTTAAGAATCA |
| | GVKHLKDFPILPGEIF | AGCAAGCAGACCATATAACATCTACCCTCACGGAATCACTGAT |
| | KYKWTVTVEDGPTK | GTCCGTCCTTTGTATTCAAGGAGATTACCAAAAGGTGTAAAAC |
| | SDPRCLTRYYSSFVN | ATTTGAAGGATTTTCCAATTCTGCCAGGAGAAATATTCAAATA |
| | MERDLASGLIGPLLIC | TAAATGGACAGTGACTGTAGAAGATGGGCCAACTAAATCAGA |
| | YKESVDQRGNQIMSD | TCCTCGGTGCCTGACCCGCTATTACTCTAGTTTCGTTAATATGG |
| | KRNVILFSVFDENRS | AGAGAGATCTAGCTTCAGGACTCATTGGCCCTCTCCTCATCTG |
| | WYLTENIQRFLPNPA | CTACAAAGAATCTGTAGATCAAAGAGGAAACCAGATAATGTC |
| | GVQLEDPEFQASNIM | AGACAAGAGGAATGTCATCCTGTTTTCTGTATTTGATGAGAAC |
| | HSINGYVFDSLQLSV | CGAAGCTGGTACCTCACAGAGAATATACAACGCTTTCTCCCCA |
| | CLHEVAYWYILSIGA | ATCCAGCTGGAGTGCAGCTTGAGGATCCAGAGTTCCAAGCCTC |
| | QTDFLSVFFSGYTFK | CAACATCATGCACAGCATCAATGGCTATGTTTTTGATAGTTTG |
| | HKMVYEDTLTLFPFS | CAGTTGTCAGTTTGTTTGCATGAGGTGGCATACTGGTACATTCT |
| | GETVFMSMENPGLWI | AAGCATTGGAGCACAGACTGACTTCCTTTCTGTCTTCTTCTCTG |
| | LGCHNSDFRNRGMT | GATATACCTTCAAACACAAAATGGTCTATGAAGACACACTCAC |
| | ALLKVSSCDKNTGDY | CCTATTCCCATTCTCAGGAGAAACTGTCTTCATGTCGATGGAA |
| | YEDSYEDISAYLLSK | AACCCAGGTCTATGGATTCTGGGGTGCCACAACTCAGACTTTC |
| | NNAIEPRSFSQNGAPG | GGAACAGAGGCATGACCGCCTTACTGAAGGTTTCTAGTTGTGA |
| | TSESATPESGPGSEPA | CAAGAACACTGGTGATTATTACGAGGACAGTTATGAAGATATT |
| | TSGSETPGTSESATPE | TCAGCATACTTGCTGAGTAAAAACAATGCCATTGAACCAAGA |
| | SGPGSEPATSGSETPG | AGCTTCTCTCAAAACGGCGCGCCAGGTACCTCAGAGTCTGCTA |
| | TSESATPESGPGTSTE | CCCCCGAGTCAGGGCCAGGATCAGAGCCAGCCACCTCCGGGT |
| | PSEGSAPGSPAGSPTS | CTGAGACACCCGGGACTTCCGAGAGTGCCACCCCTGAGTCCGG |
| | TEEGTSESATPESGPG | ACCCGGGTCCGAGCCCGCCACTTCCGGCTCCGAAACTCCCGGC |
| | SEPATSGSETPGTSES | ACAAGCGAGAGCGCTACCCCAGAGTCAGGACCAGGAACATCT |
| | ATPESGPGSPAGSPTS | ACAGAGCCCTCTGAAGGCTCCGCTCCAGGGTCCCCAGCCGGCA |
| | TEEGSPAGSPTSTEEG | GTCCCACTAGCACCGAGGAGGGAACCTCTGAAAGCGCCACAC |
| | TSTEPSEGSAPGTSES | CCGAATCAGGGCCAGGGTCTGAGCCTGCTACCAGCGGCAGCG |
| | ATPESGPGTSESATPE | AGACACCAGGCACCTCTGAGTCCGCCACACCAGAGTCCGGAC |
| | SGPGTSESATPESGPG | CCGGATCTCCCGCTGGGAGCCCCACCTCCACTGAGGAGGGATC |
| | SEPATSGSETPGSEPA | TCCTGCTGGCTCTCCAACATCTACTGAGGAAGGTACCTCAACC |
| | TSGSETPGSPAGSPTS | GAGCCATCCGAGGGATCAGCTCCCGGCACCTCAGAGTCGGCA |
| | TEEGTSTEPSEGSAPG | ACCCCGGAGTCTGGACCCGGAACTTCCGAAAGTGCCACACCA |
| | TSTEPSEGSAPGSEPA | GAGTCCGGTCCCGGGACTTCAGAATCAGCAACACCCGAGTCC |
| | TSGSETPGTSESATPE | GGCCCTGGGTCTGAACCCGCCACAAGTGGTAGTGAGACACCA |
| | SGPGTSTEPSEGSAPA | GGATCAGAACCTGCTACCTCAGGGTCAGAGACACCCGGATCTC |
| | SSPPVLKRHQAEITRT | CGGCAGGCTCACCAACCTCCACTGAGGAGGGCACCAGCACAG |
| | TLQSDQEEIDYDDTIS | AACCAAGCGAGGGCTCCGCACCCGGAACAAGCACTGAACCCA |
| | VEMKKEDFDIYDEDE | GTGAGGGTTCAGCACCCGGCTCTGAGCCGGCCACAAGTGGCA |
| | NQSPRSFQKKTRHYFI | GTGAGACACCCGGCACTTCAGAGAGTGCCACCCCCGAGAGTG |
| | AAVERLWDYGMSSS | GCCCAGGCACTAGTACCGAGCCCTCTGAAGGCAGTGCGCCAG |
| | PHVLRNRAQSGSVPQ | CCTCGAGCCCACCAGTCTTGAAACGCCATCAAGCTGAAATAAC |
| | FKKVVFQEFTDGSFT | TCGTACTACTCTTCAGTCAGATCAAGAGGAAATCGATTATGAT |
| | QPLYRGELNEHLGLL | GATACCATATCAGTTGAAATGAAGAAGGAAGATTTTGACATTT |
| | GPYIRAEVEDNIMVT | ATGATGAGGATGAAAATCAGAGCCCCCGCAGCTTTCAAAAGA |
| | FRNQASRPYSFYSSLI | AAACACGACACTATTTTATTGCTGCAGTGGAGAGGCTCTGGGA |
| | SYEEDQRQGAEPRKN | TTATGGGATGAGTAGCTCCCCACATGTTCTAAGAAACAGGGCT |
| | FVKPNETKTYFWKV | CAGAGTGGCAGTGTCCCTCAGTTCAAGAAAGTTGTTTTCCAGG |
| | QHHMAPTKDEFDCK | AATTTACTGATGGCTCCTTTACTCAGCCCTTATACCGTGGAGA |
| | AWAYFSDVDLEKDV | ACTAAATGAACATTTGGGACTCCTGGGGCCATATATAAGAGCA |
| | HSGLIGPLLVCHTNTL | GAAGTTGAAGATAATATCATGGTAACTTTCAGAAATCAGGCCT |
| | NPAHGRQVTVQEFAL | CTCGTCCCTATTCCTTCTATTCTAGCCTTATTTCTTATGAGGAA |
| | FFTIFDETKSWYFTEN | GATCAGAGGCAAGGAGCAGAACCTAGAAAAAACTTTGTCAAG |
| | MERNCRAPCNIQMED | CCTAATGAAACCAAAACTTACTTTTGGAAAGTGCAACATCATA |
| | PTFKENYRFHAINGYI | TGGCACCCACTAAAGATGAGTTTGACTGCAAAGCCTGGGCTTA |
| | MDTLPGLVMAQDQR | TTTCTCTGATGTTGACCTGGAAAAAGATGTGCACTCAGGCCTG |
| | IRWYLLSMGSNENIH | ATTGGACCCCTTCTGGTCTGCCACACTAACACACTGAACCCTG |
| | SIHFSGHVFTVRKKEE | CTCATGGGAGACAAGTGACAGTACAGGAATTTGCTCTGTTTTT |
| | YKMALYNLYPGVFE | CACCATCTTTGATGAGACCAAAAGCTGGTACTTCACTGAAAAT |
| | TVEMLPSKAGIWRVE | ATGGAAAGAAACTGCAGGGCTCCCTGCAATATCCAGATGGAA |
| | CLIGEHLHAGMSTLF | GATCCCACTTTTAAAGAGAATTATCGCTTCCATGCAATCAATG |
| | LVYSNKCQTPLGMAS | GCTACATAATGGATACACTACCTGGCTTAGTAATGGCTCAGGA |
| | GHIRDFQITASGQYG | TCAAAGGATTCGATGGTATCTGCTCAGCATGGGCAGCAATGAA |
| | QWAPKLARLHYSGSI | AACATCCATTCTATTCATTTCAGTGGACATGTGTTCACTGTACG |
| | NAWSTKEPFSWIKVD | AAAAAAAGAGGAGTATAAAATGGCACTGTACAATCTCTATCC |
| | LLAPMIIHGIKTQGAR | AGGTGTTTTTGAGACAGTGGAAATGTTACCATCCAAAGCTGGA |
| | QKFSSLYISQFIIMYSL | ATTTGGCGGGTGGAATGCCTTATTGGCGAGCATCTACATGCTG |
| | DGKKWQTYRGNSTG | GGATGAGCACACTTTTTCTGGTGTACAGCAATAAGTGTCAGAC |
| | TLMVFFGNVDSSGIK | TCCCCTGGGAATGGCTTCTGGACACATTAGAGATTTTCAGATT |
| | HNIFNPPIIARYIRLHP | ACAGCTTCAGGACAATATGGACAGTGGGCCCCAAAGCTGGCC |
| | THYSIRSTLRMELMG | AGACTTCATTATTCCGGATCAATCAATGCCTGGAGCACCAAGG |
| | CDLNSCSMPLGMESK | AGCCCTTTTCTTGGATCAAGGTGGATCTGTTGGCACCAATGAT |
| | AISDAQITASSYFTNM | TATTCACGGCATCAAGACCCAGGGTGCCCGTCAGAAGTTCTCC |
| | FATWSPSKARLHLQG | AGCCTCTACATCTCTCAGTTTATCATCATGTATAGTCTTGATGG |
| | RSNAWRPQVNNPKE | GAAGAAGTGGCAGACTTATCGAGGAAATTCCACTGGAACCTT |
| | WLQVDFQKTMKVTG | AATGGTCTTCTTTGGCAATGTGGATTCATCTGGGATAAAACAC |
| | VTTQGVKSLLTSMYV | AATATTTTTAACCCTCCAATTATTGCTCGATACATCCGTTTGCA |
| | KEFLISSSQDGHQWT | CCCAACTCATTATAGCATTCGCAGCACTCTTCGCATGGAGTTG |
| | LFFQNGKVKVFQGN | ATGGGCTGTGATTTAAATAGTTGCAGCATGCCATTGGGAATGG |
| | QDSFTPVVNSLDPPLL | AGAGTAAAGCAATATCAGATGCACAGATTACTGCTTCATCCTA |
| | TRYLRIHPQSWVHQI | CTTTACCAATATGTTTGCCACCTGGTCTCCTTCAAAAGCTCGAC |
| | ALRMEVLGCEAQDL | TTCACCTCCAAGGGAGGAGTAATGCCTGGAGACCTCAGGTGA |
| | YGAGSPGAETAEQKL | ATAATCCAAAAGAGTGGCTGCAAGTGGACTTCCAGAAGACAA |
| | ISEEDLSPATG | TGAAAGTCACAGGAGTAACTACTCAGGGAGTAAAATCTCTGCT |
| | | TACCAGCATGTATGTGAAGGAGTTCCTCATCTCCAGCAGTCAA |
| | | GATGGCCATCAGTGGACTCTCTTTTTTCAGAATGGCAAAGTAA |
| | | AGGTTTTTCAGGGAAATCAAGACTCCTTCACACCTGTGGTGAA |
| | | CTCTCTAGACCCACCGTTACTGACTCGCTACCTTCGAATTCACC |
| | | CCCAGAGTTGGGTGCACCAGATTGCCCTGAGGATGGAGGTTCT |
| | | GGGCTGCGAGGCACAGGACCTCTACGGCGCCGGATCACCTGG |
| | | GGCCGAAACGGCCGAACAAAAACTCATCTCAGAAGAGGATCT |
| | | GTCACCTGCAACCGGTTGA |
| pBC0137- | MQIELSTCFFLCLL | atgcaaatagagctctccacctgatctttctgtgccttttgcgattctgctttagtgccaccagaa |
| 2 | RFCFSATRRYYLGA | gatactacctgggtgcagtggaactgtcatgggactatatgcaaagtgatctcggtgagctgc |
| | VELSWDYMQSDLG | ctgtggacgcaagatttcctcctagagtgccaaaatcttttccattcaacacctcagtcgtgtaca |
| | ELPVDARFPPRVPK | aaaagactctgtttgtagaattcacggatcaccttttcaacatcgctaagccaaggccaccctg |
| | SFPFNTSVVYKKTL | gatgggtctgctaggtcctaccatccaggctgaggtttatgatacagtggtcattacacttaaga |
| | FVEFTDHLFNIAKP | acatggcttcccatcctgtcagtcttcatgctgttggtgtatcctactggaaagcttctgagggag |
| | RPPWMGLLGPTIQA | ctgaatatgatgatcagaccagtcaaagggagaaagaagatgataaagtcttccctggtggaa |
| | EVYDTVVITLKNM | gccatacatatgtctggcaggtcctgaaagagaatggtccaatggcctctgacccactgtgcct |
| | ASHPVSLHAVGVS | tacctactcatatctttctcatgtggacctggtaaaagacttgaattcaggcctcattggagccct |
| | YWKASEGAEYDDQ | actagtatgtagagaagggagtctggccaaggaaaagacacagaccttgcacaaatttatact |
| | TSQREKEDDKVFPG | actttttgctgtatttgatgaagggaaaagttggcactcagaaacaaagaactccttgatgcagg |
| | GSHTYVWQVLKEN | atagggatgctgcatctgctcgggcctggcctaaaatgcacacagtcaatggttatgtaaaca |
| | GPMASDPLCLTYSY | ggtctctgccaggtctgattggatgccacaggaaatcagtctattggcatgtgattggaatggg |
| | LSHVDLVKDLNSG | caccactcctgaagtgcactcaatattcctcgaaggtcacacatttcttgtgaGGAACCA |
| | LIGALLVCREGSLA | TCGCCAGGCTAGCTTGGAAATCTCGCCAATAACTttccttactg |
| | KEKTQTLHKFILLF | ctcaaacactatgatggaccttggacagtttctactgttttgtcatatctcttcccaccaacatgat |
| | AVFDEGKSWHSET | ggcatggaagcttatgtcaaagtagacagctgtccagaggaaccccaactacgaatgaaaaa |
| | KNSLMQDRDAASA | taatgaagaagcggaagactatgatgatgatcttactgattctgaaatggatgtggtcaggtttg |
| | RAWPKMHTVNGY | atgatgacaactctccttcctttatccaaattcgctcagttgccaagaagcatcctaaaacttggg |
| | VNRSLPGLIGCHRK | tacattacattgctgctgaagaggaggactgggactatgctccatagtcctcgcccccgatga |
| | SVYWHVIGMGTTP | cagaagttataaaagtcaatatttgaacaatggccctcagcggattggtaggaagtacaaaaa |
| | EVHSIFLEGHTFLV | agtccgatttatggcatacacagatgaaacctttaagactcgtgaagctattcagcatgaatcag |
| | RNHRQASLEISPITF | gaatcttgggacctttactttatggggaagttggagacacactgttgattatatttaagaatcaag |
| | LTAQTLLMDLGQF | caagcagaccatataacatctaccctcacggaatcactgatgtccgtcctttgtattcaaggaga |
| | LLFCHISSHQHDGM | ttaccaaaaggtgtaaaacatttgaaggattttccaattctgccaggagaaatattcaaatataaa |
| | EAYVKVDSCPEEPQ | tggacagtgactgtagaagatgggccaactaaatcagatcctcggtgcctgacccgctattact |
| | LRMKNNEEAEDYD | ctagtttcgttaatatggagagagatctagcttcaggactcattggccctctcctcatctgctaca |
| | DDLTDSEMDVVRF | aagaatctgtagatcaaagaggaaaccagataatgtcagacaagaggaatgtcatcctgttttc |
| | DDDNSPSFIQIRSVA | tgtatttgatgagaaccgaagctggtacctcacagagaatatacaacgctttctccccaatcca |
| | KKHPKTWVHYIAA | gctggagtgcAGCTTGAGGATCCAGAGTTCcaagcctccaacatcatgca |
| | EEEDWDYAPLVLA | cagcatcaatggctatgtttttgatagtttgcagttgtcagtttgtttgcatgaggtggcatactggt |
| | PDDRSYKSQYLNN | acattctaagcattggagcacagactgacttcctttctgtatcttctctggatataccttcaaaca |
| | GPQRIGRKYKKVRF | caaaatggtctatgaagacacactcaccctattcccattctcaggagaaactgtcttcatgtcga |
| | MAYTDETFKTREAI | tggaaaacccaggtctatggattctggggtgccacaactcagactttcggaacagaggcatga |
| | QHESGILGPLLYGE | ccgccttactgaaggtttctagttgtgacaagaacactggtgattattacgaggacagttatgaa |
| | VGDTLLIIFKNQAS | gatatttcagcatacttgctgagtaaaaacaatgccattgaaccaagaagcttctctGGCGC |
| | RPYNIYPHGITDVR | GCCAggtacctcagagtctgctaccCCCGAGTCAGGGCCAGGATCAG |
| | PLYSRRLPKGVKHL | AGCCAGCCACCTCCGGGTCTGAGACACCCGGGACTTCCG |
| | KDFPILPGEIFKYK | AGAGTGCCACCCCTGAGTCCGGACCCGGGTCCGAGCCC |
| | WTVTVEDGPTKSD | GCCACTTCCGGCTCCGAAACTCCCGGCACAAGCGAGAG |
| | PRCLTRYYSSFVNM | CGCTACCCCAGAGTCAGGACCAGGAACATCTACAGAGC |
| | ERDLASGLIGPLLIC | CCTCTGAAGGCTCCGCTCCAGGGTCCCCAGCCGGCAGTC |
| | YKESVDQRGNQIM | CCACTAGCACCGAGGAGGGAACCTCTGAAAGCGCCACA |
| | SDKRNVILFSVFDE | CCCGAATCAGGGCCAGGGTCTGAGCCTGCTACCAGCGGC |
| | NRSWYLTENIQRFL | AGCGAGACACCAGGCACCTCTGAGTCCGCCACACCAGA |
| | PNPAGVQLEDPEFQ | GTCCGGACCCGGATCTCCCGCTGGGAGCCCCACCTCCAC |
| | ASNIMHSINGYVFD | TGAGGAGGGATCTCCTGCTGGCTCTCCAACATCTACTGA |
| | SLQLSVCLHEVAY | GGAAGGTACCTCAACCGAGCCATCCGAGGGATCAGCTC |
| | WYILSIGAQTDFLS | CCGGCACCTCAGAGTCGGCAACCCCGGAGTCTGGACCC |
| | VFFSGYTFKHKMV | GGAACTTCCGAAAGTGCCACACCAGAGTCCGGTCCCGG |
| | YEDTLTLFPFSGET | GACTTCAGAATCAGCAACACCCGAGTCCGGCCCTGGGTC |
| | VFMSMENPGLWIL | TGAACCCGCCACAAGTGGTAGTGAGACACCAGGATCAG |
| | GCHNSDFRNRGMT | AACCTGCTACCTCAGGGTCAGAGACACCCGGATCTCCGG |
| | ALLKVSSCDKNTG | CAGGCTCACCAACCTCCACTGAGGAGGGCACCAGCACA |
| | DYYEDSYEDISAYL | GAACCAAGCGAGGGCTCCGCACCCGGAACAAGCACTGA |
| | LSKNNAIEPRSFSG | ACCCAGTGAGGGTTCAGCACCCGGCTCTGAGCCGGCCAC |
| | APGTSESATPESGP | AAGTGGCAGTGAGACACCCGGCACTTCAGAGAGTGCCA |
| | GSEPATSGSETPGT | CCCCCGAGAGTGGCCCAGGCACTAGTACCGAGCCCTCTg |
| | SESATPESGPGSEPA | aaggcagtgcgccaGCCTCGAGCcaaaacccaccagtcttgaaacgccatcaaGC |
| | TSGSETPGTSESATP | TgaaataactcgtactacTCTTCAGTCAGATCAAGAGGAAATCGAT |
| | ESGPGTSTEPSEGS | TATGATGATACCATATCAGTTGAAATGAAgaaggaagattttgac |
| | APGSPAGSPTSTEE | atttatgatgaggatgaaaatcagagcccccgcagctttcaaaagaaaacacgacactattttat |
| | GTSESATPESGPGS | tgctgcagtggagaggctctgggattatgggatgagtagctccccacatgttctaagaaacag |
| | EPATSGSETPGTSES | ggctcagagtggcagtgtccctcagttcaagaaagttgttttccaggaatttactgatggctcctt |
| | ATPESGPGSPAGSP | tactcagcccttataccgtggagaactaaatgaacatttgggactcctggggccatatataaga |
| | TSTEEGSPAGSPTST | gcagaagttgaagataatatcatggtaactttcagaaatcaggcctctcgtccctattccttctatt |
| | EEGTSTEPSEGSAP | ctagccttatttcttatgaggaagatcagaggcaaggagcagaacctagaaaaaactttgtcaa |
| | GTSESATPESGPGT | gcctaatgaaaccaaaacttacttttggaaagtgcaacatcatatggcacccactaaagatgag |
| | SESATPESGPGTSES | tttgactgcaaagcctgggcttatttctctgatgttgacctggaaaaagatgtgcactcaggcct |
| | ATPESGPGSEPATS | gattggaccccttctggtctgccacactaacacactgaaccctgctcatgggagacaagtgac |
| | GSETPGSEPATSGS | agtacaggaatttgctctgtttttcaccatctttgaTGAGACCAAAAGCTGGTA |
| | ETPGSPAGSPTSTEE | CTTCactgaaaatatggaaagaaactgcagggctccctgcaatatccagatggaagatcc |
| | GTSTEPSEGSAPGT | cacttttaaagagaattatcgcttccatgcaatcaatggctacataatggatacactacctggctt |
| | STEPSEGSAPGSEPA | agtaatggctcaggatcaaaggattcgatggtatctgctcagcatgggcagcaatgaaaacat |
| | TSGSETPGTSESATP | ccattctattcatttcagtggacatgtgttcactgtacgaaaaaaagaggagtataaaatggcac |
| | ESGPGTSTEPSEGS | tgtacaatctctatccaggtgtttttgagacagtggaaatgttaccatccaaagctggaatttggc |
| | APASSQNPPVLKRH | gggtggaatgccttattggcgagcatctacatgctgggatgagcacactttttctggtgtACA |
| | QAEITRTTLQSDQE | GCAATAAGTGTCAGACTCCcctgggaatggcttctggacacattagagatttt |
| | EIDYDDTISVEMKK | cagattacagcttcaggacaatatggacagtgggccccaaagctggccagacttcattattcc |
| | EDFDIYDEDENQSP | ggatcaatcaatgcctggagcaccaaggagcccttttcttggatcaaggtggatctgttggcac |
| | RSFQKKTRHYFIAA | caatgattattcacggcatcaagacccagggtgcccgtcagaagttctccagcctctacatctc |
| | VERLWDYGMSSSP | tcagtttatcatcatgtatagtcttgatgggaagaagtggcagacttatcgaggaaattccactg |
| | HVLRNRAQSGSVP | gaaccttaatggtcttctttggcaatgtggattcatctgggataaaacacaatatttttaaccctcc |
| | QFKKVVFQEFTDGS | aattattgctcgatacatccgtttgcacccaactcattatagcattcgcagcactcttcgcatgga |
| | FTQPLYRGELNEHL | gttgatgggctgtgatttaaatagttgcagcatgccattgggaatggagagtaaagcaatatca |
| | GLLGPYIRAEVEDN | gatgcacagattactgatcatcctactttaccaatatgtttgccacctggtctccttcaaaagctc |
| | IMVTFRNQASRPYS | gacttcacctccaagggaggagtaatgcctggagacctcaggtgaataatccaaaagagtgg |
| | FYSSLISYEEDQRQ | ctgcaagtggacttccagaagacaatgaaagtcacaggagtaactactcagggagtaaaatct |
| | GAEPRKNFVKPNET | ctgcttaccagcatgtatgtgaaggagttcctcatctccagcagtcaagatggccatcagtgga |
| | KTYFWKVQHHMA | ctctcttttttcagaatggcaaagtaaaggtttttcagggaaatcaagactccttcacacctgtggt |
| | PTKDEFDCKAWAY | gaactctctagacccaccgttactgactcgctaccttcgaattcacccccagagttgggtgcac |
| | FSDVDLEKDVHSG | cagattgccctgaggatggaggttctgggctgcgaggcacaggacctctacggcgccggat |
| | LIGPLLVCHTNTLN | cacctggggccgaaacggccgaacaaaaactcatctcagaagaggatctgtcacctgcaac |
| | PAHGRQVTVQEFA | cggttga |
| | LFFTIFDETKSWYF | |
| | TENMERNCRAPCNI | |
| | QMEDPTFKENYRF | |
| | HAINGYIMDTLPGL | |
| | VMAQDQRIRWYLL | |
| | SMGSNENIHSIHFS | |
| | GHVFTVRKKEEYK | |
| | MALYNLYPGVFET | |
| | VEMLPSKAGIWRV | |
| | ECLIGEHLHAGMST | |
| | LFLVYSNKCQTPLG | |
| | MASGHIRDFQITAS | |
| | GQYGQWAPKLARL | |
| | HYSGSINAWSTKEP | |
| | FSWIKVDLLAPMII | |
| | HGIKTQGARQKFSS | |
| | LYISQFIIMYSLDGK | |
| | KWQTYRGNSTGTL | |
| | MVFFGNVDSSGIKH | |
| | NIFNPPIIARYIRLHP | |
| | THYSIRSTLRMELM | |
| | GCDLNSCSMPLGM | |
| | ESKAISDAQITASSY | |
| | FTNMFATWSPSKA | |
| | RLHLQGRSNAWRP | |
| | QVNNPKEWLQVDF | |
| | QKTMKVTGVTTQG | |
| | VKSLLTSMYVKEFL | |
| | ISSSQDGHQWTLFF | |
| | QNGKVKVFQGNQD | |
| | SFTPVVNSLDPPLL | |
| | TRYLRIHPQSWVH | |
| | QIALRMEVLGCEA | |
| | QDLYGAGSPGAET | |
| | AEQKLISEEDLSPA | |
| | TG | |
| pBC0138 | MQIELSTCFFLCLLRF | ATGCAAATAGAGCTCTCCACCTGCTTCTTTCTGTGCCTTTTGCG |
| | CFSATRRYYLGAVEL | ATTCTGCTTTAGTGCCACCAGAAGATACTACCTGGGTGCAGTG |
| | SWDYMQSDLGELPV | GAACTGTCATGGGACTATATGCAAAGTGATCTCGGTGAGCTGC |
| | DARFPPRVPKSFPFNT | CTGTGGACGCAAGATTTCCTCCTAGAGTGCCAAAATCTTTTCC |
| | SVVYKKTLFVEFTDH | ATTCAACACCTCAGTCGTGTACAAAAAGACTCTGTTTGTAGAA |
| | LFNIAKPRPPWMGLL | TTCACGGATCACCTTTTCAACATCGCTAAGCCAAGGCCACCCT |
| | GPTIQAEVYDTVVITL | GGATGGGTCTGCTAGGTCCTACCATCCAGGCTGAGGTTTATGA |
| | KNMASHPVSLHAVG | TACAGTGGTCATTACACTTAAGAACATGGCTTCCCATCCTGTC |
| | VSYWKASEGAEYDD | AGTCTTCATGCTGTTGGTGTATCCTACTGGAAAGCTTCTGAGG |
| | QTSQREKEDDKVFPG | GAGCTGAATATGATGATCAGACCAGTCAAAGGGAGAAAGAAG |
| | GSHTYVWQVLKENG | ATGATAAAGTCTTCCCTGGTGGAAGCCATACATATGTCTGGCA |
| | PMASDPLCLTYSYLS | GGTCCTGAAAGAGAATGGTCCAATGGCCTCTGACCCACTGTGC |
| | HVDLVKDLNSGLIGA | CTTACCTACTCATATCTTTCTCATGTGGACCTGGTAAAAGACTT |
| | LLVCREGSLAKEKTQ | GAATTCAGGCCTCATTGGAGCCCTACTAGTATGTAGAGAAGGG |
| | TLHKFILLFAVFDEGK | AGTCTGGCCAAGGAAAAGACACAGACCTTGCACAAATTTATA |
| | SWHSETKNSLMQDR | CTACTTTTTGCTGTATTTGATGAAGGGAAAAGTTGGCACTCAG |
| | DAASARAWPKMHTV | AAACAAAGAACTCCTTGATGCAGGATAGGGATGCTGCATCTG |
| | NGYVNRSLPGLIGCH | CTCGGGCCTGGCCTAAAATGCACACAGTCAATGGTTATGTAAA |
| | RKSVYWHVIGMGTT | CAGGTCTCTGCCAGGTCTGATTGGATGCCACAGGAAATCAGTC |
| | PEVHSIFLEGHTFLVR | TATTGGCATGTGATTGGAATGGGCACCACTCCTGAAGTGCACT |
| | NHRQASLEISPITFLT | CAATATTCCTCGAAGGTCACACATTTCTTGTGAGGAACCATCG |
| | AQTLLMDLGQFLLFC | CCAGGCTAGCTTGGAAATCTCGCCAATAACTTTCCTTACTGCT |
| | HISSHQHDGMEAYVK | CAAACACTCTTGATGGACCTTGGACAGTTTCTACTGTTTTGTCA |
| | VDSCPEEPQLRMKNN | TATCTCTTCCCACCAACATGATGGCATGGAAGCTTATGTCAAA |
| | EEAEDYDDDLTDSEM | GTAGACAGCTGTCCAGAGGAACCCCAACTACGAATGAAAAAT |
| | DVVRFDDDNSPSFIQI | AATGAAGAAGCGGAAGACTATGATGATGATCTTACTGATTCTG |
| | RSVAKKHPKTWVHYI | AAATGGATGTGGTCAGGTTTGATGATGACAACTCTCCTTCCTT |
| | AAEEEDWDYAPLVL | TATCCAAATTCGCTCAGTTGCCAAGAAGCATCCTAAAACTTGG |
| | APDDRSYKSQYLNNG | GTACATTACATTGCTGCTGAAGAGGAGGACTGGGACTATGCTC |
| | PQRIGRKYKKVRFMA | CCTTAGTCCTCGCCCCCGATGACAGAAGTTATAAAAGTCAATA |
| | YTDETFKTREAIQHES | TTTGAACAATGGCCCTCAGCGGATTGGTAGGAAGTACAAAAA |
| | GILGPLLYGEVGDTL | AGTCCGATTTATGGCATACACAGATGAAACCTTTAAGACTCGT |
| | LIIFKNQASRPYNIYP | GAAGCTATTCAGCATGAATCAGGAATCTTGGGACCTTTACTTT |
| | HGITDVRPLYSRRLPK | ATGGGGAAGTTGGAGACACACTGTTGATTATATTTAAGAATCA |
| | GVKHLKDFPILPGEIF | AGCAAGCAGACCATATAACATCTACCCTCACGGAATCACTGAT |
| | KYKWTVTVEDGPTK | GTCCGTCCTTTGTATTCAAGGAGATTACCAAAAGGTGTAAAAC |
| | SDPRCLTRYYSSFVN | ATTTGAAGGATTTTCCAATTCTGCCAGGAGAAATATTCAAATA |
| | MERDLASGLIGPLLIC | TAAATGGACAGTGACTGTAGAAGATGGGCCAACTAAATCAGA |
| | YKESVDQRGNQIMSD | TCCTCGGTGCCTGACCCGCTATTACTCTAGTTTCGTTAATATGG |
| | KRNVILFSVFDENRS | AGAGAGATCTAGCTTCAGGACTCATTGGCCCTCTCCTCATCTG |
| | WYLTENIQRFLPNPA | CTACAAAGAATCTGTAGATCAAAGAGGAAACCAGATAATGTC |
| | GVQLEDPEFQASNIM | AGACAAGAGGAATGTCATCCTGTTTTCTGTATTTGATGAGAAC |
| | HSINGYVFDSLQLSV | CGAAGCTGGTACCTCACAGAGAATATACAACGCTTTCTCCCCA |
| | CLHEVAYWYILSIGA | ATCCAGCTGGAGTGCAGCTTGAGGATCCAGAGTTCCAAGCCTC |
| | QTDFLSVFFSGYTFK | CAACATCATGCACAGCATCAATGGCTATGTTTTTGATAGTTTG |
| | HKMVYEDTLTLFPFS | CAGTTGTCAGTTTGTTTGCATGAGGTGGCATACTGGTACATTCT |
| | GETVFMSMENPGLWI | AAGCATTGGAGCACAGACTGACTTCCTTTCTGTCTTCTTCTCTG |
| | LGCHNSDFRNRGMT | GATATACCTTCAAACACAAAATGGTCTATGAAGACACACTCAC |
| | ALLKVSSCDKNTGDY | CCTATTCCCATTCTCAGGAGAAACTGTCTTCATGTCGATGGAA |
| | YEDSYEDISAYLLSK | AACCCAGGTCTATGGATTCTGGGGTGCCACAACTCAGACTTTC |
| | NNAIEPRSFSQNPPVL | GGAACAGAGGCATGACCGCCTTACTGAAGGTTTCTAGTTGTGA |
| | KRHQREITRTTLQSD | CAAGAACACTGGTGATTATTACGAGGACAGTTATGAAGATATT |
| | QEEIDYDDTISVEMK | TCAGCATACTTGCTGAGTAAAAACAATGCCATTGAACCAAGA |
| | KEDFDIYDEDENQSP | AGCTTCTCTCAAAACCCACCAGTCTTGAAACGCCATCAACGGG |
| | RSFQKKTRHYFIAAV | AAATAACTCGTACTACTCTTCAGTCAGATCAAGAGGAAATCGA |
| | ERLWDYGMSSSPHVL | TTATGATGATACCATATCAGTTGAAATGAAGAAGGAAGATTTT |
| | RNRAQGAPGSPAGSP | GACATTTATGATGAGGATGAAAATCAGAGCCCCCGCAGCTTTC |
| | TSTEEGTSESATPESG | AAAAGAAAACACGACACTATTTTATTGCTGCAGTGGAGAGGC |
| | PGSEPATSGSETPASS | TCTGGGATTATGGGATGAGTAGCTCCCCACATGTTCTAAGAAA |
| | RAQSGSVPQFKKVVF | CAGGGCTCAGGGCGCGCCAGGTTCTCCTGCTGGCTCCCCCACC |
| | QEFTDGSFTQPLYRG | TCAACAGAAGAGGGGACAAGCGAAAGCGCTACGCCTGAGAGT |
| | ELNEHLGLLGPYIRAE | GGCCCTGGCTCTGAGCCAGCCACCTCCGGCTCTGAAACCCCTG |
| | VEDNIMVTFRNQASR | CCTCGAGCAGGGCTCAGAGTGGCAGTGTCCCTCAGTTCAAGAA |
| | PYSFYSSLISYEEDQR | AGTTGTTTTCCAGGAATTTACTGATGGCTCCTTTACTCAGCCCT |
| | QGAEPRKNFVKPNET | TATACCGTGGAGAACTAAATGAACATTTGGGACTCCTGGGGCC |
| | KTYFWKVQHHMAPT | ATATATAAGAGCAGAAGTTGAAGATAATATCATGGTAACTTTC |
| | KDEFDCKAWAYFSD | AGAAATCAGGCCTCTCGTCCCTATTCCTTCTATTCTAGCCTTAT |
| | VDLEKDVHSGLIGPL | TTCTTATGAGGAAGATCAGAGGCAAGGAGCAGAACCTAGAAA |
| | LVCHTNTLNPAHGRQ | AAACTTTGTCAAGCCTAATGAAACCAAAACTTACTTTTGGAAA |
| | VTVQEFALFFTIFDET | GTGCAACATCATATGGCACCCACTAAAGATGAGTTTGACTGCA |
| | KSWYFTENMERNCR | AAGCCTGGGCTTATTTCTCTGATGTTGACCTGGAAAAAGATGT |
| | APCNIQMEDPTFKEN | GCACTCAGGCCTGATTGGACCCCTTCTGGTCTGCCACACTAAC |
| | YRFHAINGYIMDTLP | ACACTGAACCCTGCTCATGGGAGACAAGTGACAGTACAGGAA |
| | GLVMAQDQRIRWYL | TTTGCTCTGTTTTTCACCATCTTTGATGAGACCAAAAGCTGGTA |
| | LSMGSNENIHSIHFSG | CTTCACTGAAAATATGGAAAGAAACTGCAGGGCTCCCTGCAAT |
| | HVFTVRKKEEYKMA | ATCCAGATGGAAGATCCCACTTTTAAAGAGAATTATCGCTTCC |
| | LYNLYPGVFETVEML | ATGCAATCAATGGCTACATAATGGATACACTACCTGGCTTAGT |
| | PSKAGIWRVECLIGE | AATGGCTCAGGATCAAAGGATTCGATGGTATCTGCTCAGCATG |
| | HLHAGMSTLFLVYSN | GGCAGCAATGAAAACATCCATTCTATTCATTTCAGTGGACATG |
| | KCQTPLGMASGHIRD | TGTTCACTGTACGAAAAAAAGAGGAGTATAAAATGGCACTGT |
| | FQITASGQYGQWAPK | ACAATCTCTATCCAGGTGTTTTTGAGACAGTGGAAATGTTACC |
| | LARLHYSGSINAWST | ATCCAAAGCTGGAATTTGGCGGGTGGAATGCCTTATTGGCGAG |
| | KEPFSWIKVDLLAPMI | CATCTACATGCTGGGATGAGCACACTTTTTCTGGTGTACAGCA |
| | IHGIKTQGARQKFSSL | ATAAGTGTCAGACTCCCCTGGGAATGGCTTCTGGACACATTAG |
| | YISQFIIMYSLDGKKW | AGATTTTCAGATTACAGCTTCAGGACAATATGGACAGTGGGCC |
| | QTYRGNSTGTLMVFF | CCAAAGCTGGCCAGACTTCATTATTCCGGATCAATCAATGCCT |
| | GNVDSSGIKHNIFNPP | GGAGCACCAAGGAGCCCTTTTCTTGGATCAAGGTGGATCTGTT |
| | IIARYIRLHPTHYSIRS | GGCACCAATGATTATTCACGGCATCAAGACCCAGGGTGCCCGT |
| | TLRMELMGCDLNSCS | CAGAAGTTCTCCAGCCTCTACATCTCTCAGTTTATCATCATGTA |
| | MPLGMESKAISDAQI | TAGTCTTGATGGGAAGAAGTGGCAGACTTATCGAGGAAATTCC |
| | TASSYFTNMFATWSP | ACTGGAACCTTAATGGTCTTCTTTGGCAATGTGGATTCATCTG |
| | SKARLHLQGRSNAW | GGATAAAACACAATATTTTTAACCCTCCAATTATTGCTCGATA |
| | RPQVNNPKEWLQVD | CATCCGTTTGCACCCAACTCATTATAGCATTCGCAGCACTCTTC |
| | FQKTMKVTGVTTQG | GCATGGAGTTGATGGGCTGTGATTTAAATAGTTGCAGCATGCC |
| | VKSLLTSMYVKEFLIS | ATTGGGAATGGAGAGTAAAGCAATATCAGATGCACAGATTAC |
| | SSQDGHQWTLFFQNG | TGCTTCATCCTACTTTACCAATATGTTTGCCACCTGGTCTCCTT |
| | KVKVFQGNQDSFTPV | CAAAAGCTCGACTTCACCTCCAAGGGAGGAGTAATGCCTGGA |
| | VNSLDPPLLTRYLRIH | GACCTCAGGTGAATAATCCAAAAGAGTGGCTGCAAGTGGACT |
| | PQSWVHQIALRMEVL | TCCAGAAGACAATGAAAGTCACAGGAGTAACTACTCAGGGAG |
| | GCEAQDLYGAGSPG | TAAAATCTCTGCTTACCAGCATGTATGTGAAGGAGTTCCTCAT |
| | AETAEQKLISEEDLSP | CTCCAGCAGTCAAGATGGCCATCAGTGGACTCTCTTTTTTCAG |
| | ATG | AATGGCAAAGTAAAGGTTTTTCAGGGAAATCAAGACTCCTTCA |
| | | CACCTGTGGTGAACTCTCTAGACCCACCGTTACTGACTCGCTA |
| | | CCTTCGAATTCACCCCCAGAGTTGGGTGCACCAGATTGCCCTG |
| | | AGGATGGAGGTTCTGGGCTGCGAGGCACAGGACCTCTACGGC |
| | | GCCGGATCACCTGGGGCCGAAACGGCCGAACAAAAACTCATC |
| | | TCAGAAGAGGATCTGTCACCTGCAACCGGTTGA |
| pBC0139 | MQIELSTCFFLCLLRF | ATGCAAATAGAGCTCTCCACCTGCTTCTTTCTGTGCCTTTTGCG |
| | CFSATRRYYLGAVEL | ATTCTGCTTTAGTGCCACCAGAAGATACTACCTGGGTGCAGTG |
| | SWDYMQSDLGELPV | GAACTGTCATGGGACTATATGCAAAGTGATCTCGGTGAGCTGC |
| | DARFPPRVPKSFPFNT | CTGTGGACGCAAGATTTCCTCCTAGAGTGCCAAAATCTTTTCC |
| | SVVYKKTLFVEFTDH | ATTCAACACCTCAGTCGTGTACAAAAAGACTCTGTTTGTAGAA |
| | LFNIAKPRPPWMGLL | TTCACGGATCACCTTTTCAACATCGCTAAGCCAAGGCCACCCT |
| | GPTIQAEVYDTVVITL | GGATGGGTCTGCTAGGTCCTACCATCCAGGCTGAGGTTTATGA |
| | KNMASHPVSLHAVG | TACAGTGGTCATTACACTTAAGAACATGGCTTCCCATCCTGTC |
| | VSYWKASEGAEYDD | AGTCTTCATGCTGTTGGTGTATCCTACTGGAAAGCTTCTGAGG |
| | QTSQREKEDDKVFPG | GAGCTGAATATGATGATCAGACCAGTCAAAGGGAGAAAGAAG |
| | GSHTYVWQVLKENG | ATGATAAAGTCTTCCCTGGTGGAAGCCATACATATGTCTGGCA |
| | PMASDPLCLTYSYLS | GGTCCTGAAAGAGAATGGTCCAATGGCCTCTGACCCACTGTGC |
| | HVDLVKDLNSGLIGA | CTTACCTACTCATATCTTTCTCATGTGGACCTGGTAAAAGACTT |
| | LLVCREGSLAKEKTQ | GAATTCAGGCCTCATTGGAGCCCTACTAGTATGTAGAGAAGGG |
| | TLHKFILLFAVFDEGK | AGTCTGGCCAAGGAAAAGACACAGACCTTGCACAAATTTATA |
| | SWHSETKNSLMQDR | CTACTTTTTGCTGTATTTGATGAAGGGAAAAGTTGGCACTCAG |
| | DAASARAWPKMHTV | AAACAAAGAACTCCTTGATGCAGGATAGGGATGCTGCATCTG |
| | NGYVNRSLPGLIGCH | CTCGGGCCTGGCCTAAAATGCACACAGTCAATGGTTATGTAAA |
| | RKSVYWHVIGMGTT | CAGGTCTCTGCCAGGTCTGATTGGATGCCACAGGAAATCAGTC |
| | PEVHSIFLEGHTFLVR | TATTGGCATGTGATTGGAATGGGCACCACTCCTGAAGTGCACT |
| | NHRQASLEISPITFLT | CAATATTCCTCGAAGGTCACACATTTCTTGTGAGGAACCATCG |
| | AQTLLMDLGQFLLFC | CCAGGCTAGCTTGGAAATCTCGCCAATAACTTTCCTTACTGCT |
| | HISSHQHDGMEAYVK | CAAACACTCTTGATGGACCTTGGACAGTTTCTACTGTTTTGTCA |
| | VDSCPEEPQLRMKNN | TATCTCTTCCCACCAACATGATGGCATGGAAGCTTATGTCAAA |
| | EEAEDYDDDLTDSEM | GTAGACAGCTGTCCAGAGGAACCCCAACTACGAATGAAAAAT |
| | DVVRFDDDNSPSFIQI | AATGAAGAAGCGGAAGACTATGATGATGATCTTACTGATTCTG |
| | RSVAKKHPKTWVHYI | AAATGGATGTGGTCAGGTTTGATGATGACAACTCTCCTTCCTT |
| | AAEEEDWDYAPLVL | TATCCAAATTCGCTCAGTTGCCAAGAAGCATCCTAAAACTTGG |
| | APDDRSYKSQYLNNG | GTACATTACATTGCTGCTGAAGAGGAGGACTGGGACTATGCTC |
| | PQRIGRKYKKVRFMA | CCTTAGTCCTCGCCCCCGATGACAGAAGTTATAAAAGTCAATA |
| | YTDETFKTREAIQHES | TTTGAACAATGGCCCTCAGCGGATTGGTAGGAAGTACAAAAA |
| | GILGPLLYGEVGDTL | AGTCCGATTTATGGCATACACAGATGAAACCTTTAAGACTCGT |
| | LIIFKNQASRPYNIYP | GAAGCTATTCAGCATGAATCAGGAATCTTGGGACCTTTACTTT |
| | HGITDVRPLYSRRLPK | ATGGGGAAGTTGGAGACACACTGTTGATTATATTTAAGAATCA |
| | GVKHLKDFPILPGEIF | AGCAAGCAGACCATATAACATCTACCCTCACGGAATCACTGAT |
| | KYKWTVTVEDGPTK | GTCCGTCCTTTGTATTCAAGGAGATTACCAAAAGGTGTAAAAC |
| | SDPRCLTRYYSSFVN | ATTTGAAGGATTTTCCAATTCTGCCAGGAGAAATATTCAAATA |
| | MERDLASGLIGPLLIC | TAAATGGACAGTGACTGTAGAAGATGGGCCAACTAAATCAGA |
| | YKESVDQRGNQIMSD | TCCTCGGTGCCTGACCCGCTATTACTCTAGTTTCGTTAATATGG |
| | KRNVILFSVFDENRS | AGAGAGATCTAGCTTCAGGACTCATTGGCCCTCTCCTCATCTG |
| | WYLTENIQRFLPNPA | CTACAAAGAATCTGTAGATCAAAGAGGAAACCAGATAATGTC |
| | GVQLEDPEFQASNIM | AGACAAGAGGAATGTCATCCTGTTTTCTGTATTTGATGAGAAC |
| | HSINGYVFDSLQLSV | CGAAGCTGGTACCTCACAGAGAATATACAACGCTTTCTCCCCA |
| | CLHEVAYWYILSIGA | ATCCAGCTGGAGTGCAGCTTGAGGATCCAGAGTTCCAAGCCTC |
| | QTDFLSVFFSGYTFK | CAACATCATGCACAGCATCAATGGCTATGTTTTTGATAGTTTG |
| | HKMVYEDTLTLFPFS | CAGTTGTCAGTTTGTTTGCATGAGGTGGCATACTGGTACATTCT |
| | GETVFMSMENPGLWI | AAGCATTGGAGCACAGACTGACTTCCTTTCTGTCTTCTTCTCTG |
| | LGCHNSDFRNRGMT | GATATACCTTCAAACACAAAATGGTCTATGAAGACACACTCAC |
| | ALLKVSSCDKNTGDY | CCTATTCCCATTCTCAGGAGAAACTGTCTTCATGTCGATGGAA |
| | YEDSYEDISAYLLSK | AACCCAGGTCTATGGATTCTGGGGTGCCACAACTCAGACTTTC |
| | NNAIEPRSFSQNPPVL | GGAACAGAGGCATGACCGCCTTACTGAAGGTTTCTAGTTGTGA |
| | KRHQREITRTTLQSD | CAAGAACACTGGTGATTATTACGAGGACAGTTATGAAGATATT |
| | QEEIDYDDTISVEMK | TCAGCATACTTGCTGAGTAAAAACAATGCCATTGAACCAAGA |
| | KEDFDIYDEDENQSP | AGCTTCTCTCAAAACCCACCAGTCTTGAAACGCCATCAACGGG |
| | RSFQKKTRHYFIAAV | AAATAACTCGTACTACTCTTCAGTCAGATCAAGAGGAAATCGA |
| | ERLWDYGMSSSPHVL | TTATGATGATACCATATCAGTTGAAATGAAGAAGGAAGATTTT |
| | RNRAQSGSVPQFKKV | GACATTTATGATGAGGATGAAAATCAGAGCCCCCGCAGCTTTC |
| | VFQEFTDGSFTQPLY | AAAAGAAAACACGACACTATTTTATTGCTGCAGTGGAGAGGC |
| | RGELNEHLGLLGPYI | TCTGGGATTATGGGATGAGTAGCTCCCCACATGTTCTAAGAAA |
| | RAEVEDNIMVTFRNQ | CAGGGCTCAGAGTGGCAGTGTCCCTCAGTTCAAGAAAGTTGTT |
| | ASRPYSFYSSLISYEE | TTCCAGGAATTTACTGATGGCTCCTTTACTCAGCCCTTATACCG |
| | DQGAPGSPAGSPTST | TGGAGAACTAAATGAACATTTGGGACTCCTGGGGCCATATATA |
| | EEGTSESATPESGPGS | AGAGCAGAAGTTGAAGATAATATCATGGTAACTTTCAGAAAT |
| | EPATSGSETPASSRQG | CAGGCCTCTCGTCCCTATTCCTTCTATTCTAGCCTTATTTCTTAT |
| | AEPRKNFVKPNETKT | GAGGAAGATCAGGGCGCGCCAGGTTCTCCTGCTGGCTCCCCCA |
| | YFWKVQHHMAPTKD | CCTCAACAGAAGAGGGGACAAGCGAAAGCGCTACGCCTGAGA |
| | EFDCKAWAYFSDVD | GTGGCCCTGGCTCTGAGCCAGCCACCTCCGGCTCTGAAACCCC |
| | LEKDVHSGLIGPLLV | TGCCTCGAGCAGGCAAGGAGCAGAACCTAGAAAAAACTTTGT |
| | CHTNTLNPAHGRQVT | CAAGCCTAATGAAACCAAAACTTACTTTTGGAAAGTGCAACAT |
| | VQEFALFFTIFDETKS | CATATGGCACCCACTAAAGATGAGTTTGACTGCAAAGCCTGGG |
| | WYFTENMERNCRAP | CTTATTTCTCTGATGTTGACCTGGAAAAAGATGTGCACTCAGG |
| | CNIQMEDPTFKENYR | CCTGATTGGACCCCTTCTGGTCTGCCACACTAACACACTGAAC |
| | FHAINGYIMDTLPGL | CCTGCTCATGGGAGACAAGTGACAGTACAGGAATTTGCTCTGT |
| | VMAQDQRIRWYLLS | TTTTCACCATCTTTGATGAGACCAAAAGCTGGTACTTCACTGA |
| | MGSNENIHSIHFSGHV | AAATATGGAAAGAAACTGCAGGGCTCCCTGCAATATCCAGAT |
| | FTVRKKEEYKMALY | GGAAGATCCCACTTTTAAAGAGAATTATCGCTTCCATGCAATC |
| | NLYPGVFETVEMLPS | AATGGCTACATAATGGATACACTACCTGGCTTAGTAATGGCTC |
| | KAGIWRVECLIGEHL | AGGATCAAAGGATTCGATGGTATCTGCTCAGCATGGGCAGCA |
| | HAGMSTLFLVYSNKC | ATGAAAACATCCATTCTATTCATTTCAGTGGACATGTGTTCACT |
| | QTPLGMASGHIRDFQI | GTACGAAAAAAAGAGGAGTATAAAATGGCACTGTACAATCTC |
| | TASGQYGQWAPKLA | TATCCAGGTGTTTTTGAGACAGTGGAAATGTTACCATCCAAAG |
| | RLHYSGSINAWSTKE | CTGGAATTTGGCGGGTGGAATGCCTTATTGGCGAGCATCTACA |
| | PFSWIKVDLLAPMIIH | TGCTGGGATGAGCACACTTTTTCTGGTGTACAGCAATAAGTGT |
| | GIKTQGARQKFSSLYI | CAGACTCCCCTGGGAATGGCTTCTGGACACATTAGAGATTTTC |
| | SQFIIMYSLDGKKWQ | AGATTACAGCTTCAGGACAATATGGACAGTGGGCCCCAAAGC |
| | TYRGNSTGTLMVFFG | TGGCCAGACTTCATTATTCCGGATCAATCAATGCCTGGAGCAC |
| | NVDSSGIKHNIFNPPII | CAAGGAGCCCTTTTCTTGGATCAAGGTGGATCTGTTGGCACCA |
| | ARYIRLHPTHYSIRST | ATGATTATTCACGGCATCAAGACCCAGGGTGCCCGTCAGAAGT |
| | LRMELMGCDLNSCS | TCTCCAGCCTCTACATCTCTCAGTTTATCATCATGTATAGTCTT |
| | MPLGMESKAISDAQI | GATGGGAAGAAGTGGCAGACTTATCGAGGAAATTCCACTGGA |
| | TASSYFTNMFATWSP | ACCTTAATGGTCTTCTTTGGCAATGTGGATTCATCTGGGATAA |
| | SKARLHLQGRSNAW | AACACAATATTTTTAACCCTCCAATTATTGCTCGATACATCCGT |
| | RPQVNNPKEWLQVD | TTGCACCCAACTCATTATAGCATTCGCAGCACTCTTCGCATGG |
| | FQKTMKVTGVTTQG | AGTTGATGGGCTGTGATTTAAATAGTTGCAGCATGCCATTGGG |
| | VKSLLTSMYVKEFLIS | AATGGAGAGTAAAGCAATATCAGATGCACAGATTACTGCTTC |
| | SSQDGHQWTLFFQNG | ATCCTACTTTACCAATATGTTTGCCACCTGGTCTCCTTCAAAAG |
| | KVKVFQGNQDSFTPV | CTCGACTTCACCTCCAAGGGAGGAGTAATGCCTGGAGACCTCA |
| | VNSLDPPLLTRYLRIH | GGTGAATAATCCAAAAGAGTGGCTGCAAGTGGACTTCCAGAA |
| | PQSWVHQIALRMEVL | GACAATGAAAGTCACAGGAGTAACTACTCAGGGAGTAAAATC |
| | GCEAQDLYGAGSPG | TCTGCTTACCAGCATGTATGTGAAGGAGTTCCTCATCTCCAGC |
| | AETAEQKLISEEDLSP | AGTCAAGATGGCCATCAGTGGACTCTCTTTTTTCAGAATGGCA |
| | ATG | AAGTAAAGGTTTTTCAGGGAAATCAAGACTCCTTCACACCTGT |
| | | GGTGAACTCTCTAGACCCACCGTTACTGACTCGCTACCTTCGA |
| | | ATTCACCCCCAGAGTTGGGTGCACCAGATTGCCCTGAGGATGG |
| | | AGGTTCTGGGCTGCGAGGCACAGGACCTCTACGGCGCCGGAT |
| | | CACCTGGGGCCGAAACGGCCGAACAAAAACTCATCTCAGAAG |
| | | AGGATCTGTCACCTGCAACCGGTTGA |
| pBC0140 | MQIELSTCFFLCLLRF | ATGCAAATAGAGCTCTCCACCTGCTTCTTTCTGTGCCTTTTGCG |
| | CFSATRRYYLGAVEL | ATTCTGCTTTAGTGCCACCAGAAGATACTACCTGGGTGCAGTG |
| | SWDYMQSDLGELPV | GAACTGTCATGGGACTATATGCAAAGTGATCTCGGTGAGCTGC |
| | DARFPPRVPKSFPFNT | CTGTGGACGCAAGATTTCCTCCTAGAGTGCCAAAATCTTTTCC |
| | SVVYKKTLFVEFTDH | ATTCAACACCTCAGTCGTGTACAAAAAGACTCTGTTTGTAGAA |
| | LFNIAKPRPPWMGLL | TTCACGGATCACCTTTTCAACATCGCTAAGCCAAGGCCACCCT |
| | GPTIQAEVYDTVVITL | GGATGGGTCTGCTAGGTCCTACCATCCAGGCTGAGGTTTATGA |
| | KNMASHPVSLHAVG | TACAGTGGTCATTACACTTAAGAACATGGCTTCCCATCCTGTC |
| | VSYWKASEGAEYDD | AGTCTTCATGCTGTTGGTGTATCCTACTGGAAAGCTTCTGAGG |
| | QTSQREKEDDKVFPG | GAGCTGAATATGATGATCAGACCAGTCAAAGGGAGAAAGAAG |
| | GSHTYVWQVLKENG | ATGATAAAGTCTTCCCTGGTGGAAGCCATACATATGTCTGGCA |
| | PMASDPLCLTYSYLS | GGTCCTGAAAGAGAATGGTCCAATGGCCTCTGACCCACTGTGC |
| | HVDLVKDLNSGLIGA | CTTACCTACTCATATCTTTCTCATGTGGACCTGGTAAAAGACTT |
| | LLVCREGSLAKEKTQ | GAATTCAGGCCTCATTGGAGCCCTACTAGTATGTAGAGAAGGG |
| | TLHKFILLFAVFDEGK | AGTCTGGCCAAGGAAAAGACACAGACCTTGCACAAATTTATA |
| | SWHSETKNSLMQDR | CTACTTTTTGCTGTATTTGATGAAGGGAAAAGTTGGCACTCAG |
| | DAASARAWPKMHTV | AAACAAAGAACTCCTTGATGCAGGATAGGGATGCTGCATCTG |
| | NGYVNRSLPGLIGCH | CTCGGGCCTGGCCTAAAATGCACACAGTCAATGGTTATGTAAA |
| | RKSVYWHVIGMGTT | CAGGTCTCTGCCAGGTCTGATTGGATGCCACAGGAAATCAGTC |
| | PEVHSIFLEGHTFLVR | TATTGGCATGTGATTGGAATGGGCACCACTCCTGAAGTGCACT |
| | NHRQASLEISPITFLT | CAATATTCCTCGAAGGTCACACATTTCTTGTGAGGAACCATCG |
| | AQTLLMDLGQFLLFC | CCAGGCTAGCTTGGAAATCTCGCCAATAACTTTCCTTACTGCT |
| | HISSHQHDGMEAYVK | CAAACACTCTTGATGGACCTTGGACAGTTTCTACTGTTTTGTCA |
| | VDSCPEEPQLRMKNN | TATCTCTTCCCACCAACATGATGGCATGGAAGCTTATGTCAAA |
| | EEAEDYDDDLTDSEM | GTAGACAGCTGTCCAGAGGAACCCCAACTACGAATGAAAAAT |
| | DVVRFDDDNSPSFIQI | AATGAAGAAGCGGAAGACTATGATGATGATCTTACTGATTCTG |
| | RSVAKKHPKTWVHYI | AAATGGATGTGGTCAGGTTTGATGATGACAACTCTCCTTCCTT |
| | AAEEEDWDYAPLVL | TATCCAAATTCGCTCAGTTGCCAAGAAGCATCCTAAAACTTGG |
| | APDDRSYKSQYLNNG | GTACATTACATTGCTGCTGAAGAGGAGGACTGGGACTATGCTC |
| | PQRIGRKYKKVRFMA | CCTTAGTCCTCGCCCCCGATGACAGAAGTTATAAAAGTCAATA |
| | YTDETFKTREAIQHES | TTTGAACAATGGCCCTCAGCGGATTGGTAGGAAGTACAAAAA |
| | GILGPLLYGEVGDTL | AGTCCGATTTATGGCATACACAGATGAAACCTTTAAGACTCGT |
| | LIIFKNQASRPYNIYP | GAAGCTATTCAGCATGAATCAGGAATCTTGGGACCTTTACTTT |
| | HGITDVRPLYSRRLPK | ATGGGGAAGTTGGAGACACACTGTTGATTATATTTAAGAATCA |
| | GVKHLKDFPILPGEIF | AGCAAGCAGACCATATAACATCTACCCTCACGGAATCACTGAT |
| | KYKWTVTVEDGPTK | GTCCGTCCTTTGTATTCAAGGAGATTACCAAAAGGTGTAAAAC |
| | SDPRCLTRYYSSFVN | ATTTGAAGGATTTTCCAATTCTGCCAGGAGAAATATTCAAATA |
| | MERDLASGLIGPLLIC | TAAATGGACAGTGACTGTAGAAGATGGGCCAACTAAATCAGA |
| | YKESVDQRGNQIMSD | TCCTCGGTGCCTGACCCGCTATTACTCTAGTTTCGTTAATATGG |
| | KRNVILFSVFDENRS | AGAGAGATCTAGCTTCAGGACTCATTGGCCCTCTCCTCATCTG |
| | WYLTENIQRFLPNPA | CTACAAAGAATCTGTAGATCAAAGAGGAAACCAGATAATGTC |
| | GVQLEDPEFQASNIM | AGACAAGAGGAATGTCATCCTGTTTTCTGTATTTGATGAGAAC |
| | HSINGYVFDSLQLSV | CGAAGCTGGTACCTCACAGAGAATATACAACGCTTTCTCCCCA |
| | CLHEVAYWYILSIGA | ATCCAGCTGGAGTGCAGCTTGAGGATCCAGAGTTCCAAGCCTC |
| | QTDFLSVFFSGYTFK | CAACATCATGCACAGCATCAATGGCTATGTTTTTGATAGTTTG |
| | HKMVYEDTLTLFPFS | CAGTTGTCAGTTTGTTTGCATGAGGTGGCATACTGGTACATTCT |
| | GETVFMSMENPGLWI | AAGCATTGGAGCACAGACTGACTTCCTTTCTGTCTTCTTCTCTG |
| | LGCHNSDFRNRGMT | GATATACCTTCAAACACAAAATGGTCTATGAAGACACACTCAC |
| | ALLKVSSCDKNTGDY | CCTATTCCCATTCTCAGGAGAAACTGTCTTCATGTCGATGGAA |
| | YEDSYEDISAYLLSK | AACCCAGGTCTATGGATTCTGGGGTGCCACAACTCAGACTTTC |
| | NNAIEPRSFSQNPPVL | GGAACAGAGGCATGACCGCCTTACTGAAGGTTTCTAGTTGTGA |
| | KRHQREITRTTLQSD | CAAGAACACTGGTGATTATTACGAGGACAGTTATGAAGATATT |
| | QEEIDYDDTISVEMK | TCAGCATACTTGCTGAGTAAAAACAATGCCATTGAACCAAGA |
| | KEDFDIYDEDENQSP | AGCTTCTCTCAAAACCCACCAGTCTTGAAACGCCATCAACGGG |
| | RSFQKKTRHYFIAAV | AAATAACTCGTACTACTCTTCAGTCAGATCAAGAGGAAATCGA |
| | ERLWDYGMSSSPHVL | TTATGATGATACCATATCAGTTGAAATGAAGAAGGAAGATTTT |
| | RNRAQSGSVPQFKKV | GACATTTATGATGAGGATGAAAATCAGAGCCCCCGCAGCTTTC |
| | VFQEFTDGSFTQPLY | AAAAGAAAACACGACACTATTTTATTGCTGCAGTGGAGAGGC |
| | RGELNEHLGLLGPYI | TCTGGGATTATGGGATGAGTAGCTCCCCACATGTTCTAAGAAA |
| | RAEVEDNIMVTFRNQ | CAGGGCTCAGAGTGGCAGTGTCCCTCAGTTCAAGAAAGTTGTT |
| | ASRPYSFYSSLISYEE | TTCCAGGAATTTACTGATGGCTCCTTTACTCAGCCCTTATACCG |
| | DQRQGAEPGAPGSPA | TGGAGAACTAAATGAACATTTGGGACTCCTGGGGCCATATATA |
| | GSPTSTEEGTSESATP | AGAGCAGAAGTTGAAGATAATATCATGGTAACTTTCAGAAAT |
| | ESGPGSEPATSGSETP | CAGGCCTCTCGTCCCTATTCCTTCTATTCTAGCCTTATTTCTTAT |
| | ASSRKNFVKPNETKT | GAGGAAGATCAGAGGCAAGGAGCAGAACCTGGCGCGCCAGGT |
| | YFWKVQHHMAPTKD | TCTCCTGCTGGCTCCCCCACCTCAACAGAAGAGGGGACAAGCG |
| | EFDCKAWAYFSDVD | AAAGCGCTACGCCTGAGAGTGGCCCTGGCTCTGAGCCAGCCA |
| | LEKDVHSGLIGPLLV | CCTCCGGCTCTGAAACCCCTGCCTCGAGCAGAAAAAACTTTGT |
| | CHTNTLNPAHGRQVT | CAAGCCTAATGAAACCAAAACTTACTTTTGGAAAGTGCAACAT |
| | VQEFALFFTIFDETKS | CATATGGCACCCACTAAAGATGAGTTTGACTGCAAAGCCTGGG |
| | WYFTENMERNCRAP | CTTATTTCTCTGATGTTGACCTGGAAAAAGATGTGCACTCAGG |
| | CNIQMEDPTFKENYR | CCTGATTGGACCCCTTCTGGTCTGCCACACTAACACACTGAAC |
| | FHAINGYIMDTLPGL | CCTGCTCATGGGAGACAAGTGACAGTACAGGAATTTGCTCTGT |
| | VMAQDQRIRWYLLS | TTTTCACCATCTTTGATGAGACCAAAAGCTGGTACTTCACTGA |
| | MGSNENIHSIHFSGHV | AAATATGGAAAGAAACTGCAGGGCTCCCTGCAATATCCAGAT |
| | FTVRKKEEYKMALY | GGAAGATCCCACTTTTAAAGAGAATTATCGCTTCCATGCAATC |
| | NLYPGVFETVEMLPS | AATGGCTACATAATGGATACACTACCTGGCTTAGTAATGGCTC |
| | KAGIWRVECLIGEHL | AGGATCAAAGGATTCGATGGTATCTGCTCAGCATGGGCAGCA |
| | HAGMSTLFLVYSNKC | ATGAAAACATCCATTCTATTCATTTCAGTGGACATGTGTTCACT |
| | QTPLGMASGHIRDFQI | GTACGAAAAAAAGAGGAGTATAAAATGGCACTGTACAATCTC |
| | TASGQYGQWAPKLA | TATCCAGGTGTTTTTGAGACAGTGGAAATGTTACCATCCAAAG |
| | RLHYSGSINAWSTKE | CTGGAATTTGGCGGGTGGAATGCCTTATTGGCGAGCATCTACA |
| | PFSWIKVDLLAPMIIH | TGCTGGGATGAGCACACTTTTTCTGGTGTACAGCAATAAGTGT |
| | GIKTQGARQKFSSLYI | CAGACTCCCCTGGGAATGGCTTCTGGACACATTAGAGATTTTC |
| | SQFIIMYSLDGKKWQ | AGATTACAGCTTCAGGACAATATGGACAGTGGGCCCCAAAGC |
| | TYRGNSTGTLMVFFG | TGGCCAGACTTCATTATTCCGGATCAATCAATGCCTGGAGCAC |
| | NVDSSGIKHNIFNPPII | CAAGGAGCCCTTTTCTTGGATCAAGGTGGATCTGTTGGCACCA |
| | ARYIRLHPTHYSIRST | ATGATTATTCACGGCATCAAGACCCAGGGTGCCCGTCAGAAGT |
| | LRMELMGCDLNSCS | TCTCCAGCCTCTACATCTCTCAGTTTATCATCATGTATAGTCTT |
| | MPLGMESKAISDAQI | GATGGGAAGAAGTGGCAGACTTATCGAGGAAATTCCACTGGA |
| | TASSYFTNMFATWSP | ACCTTAATGGTCTTCTTTGGCAATGTGGATTCATCTGGGATAA |
| | SKARLHLQGRSNAW | AACACAATATTTTTAACCCTCCAATTATTGCTCGATACATCCGT |
| | RPQVNNPKEWLQVD | TTGCACCCAACTCATTATAGCATTCGCAGCACTCTTCGCATGG |
| | FQKTMKVTGVTTQG | AGTTGATGGGCTGTGATTTAAATAGTTGCAGCATGCCATTGGG |
| | VKSLLTSMYVKEFLIS | AATGGAGAGTAAAGCAATATCAGATGCACAGATTACTGCTTC |
| | SSQDGHQWTLFFQNG | ATCCTACTTTACCAATATGTTTGCCACCTGGTCTCCTTCAAAAG |
| | KVKVFQGNQDSFTPV | CTCGACTTCACCTCCAAGGGAGGAGTAATGCCTGGAGACCTCA |
| | VNSLDPPLLTRYLRIH | GGTGAATAATCCAAAAGAGTGGCTGCAAGTGGACTTCCAGAA |
| | PQSWVHQIALRMEVL | GACAATGAAAGTCACAGGAGTAACTACTCAGGGAGTAAAATC |
| | GCEAQDLYGAGSPG | TCTGCTTACCAGCATGTATGTGAAGGAGTTCCTCATCTCCAGC |
| | AETAEQKLISEEDLSP | AGTCAAGATGGCCATCAGTGGACTCTCTTTTTTCAGAATGGCA |
| | ATG | AAGTAAAGGTTTTTCAGGGAAATCAAGACTCCTTCACACCTGT |
| | | GGTGAACTCTCTAGACCCACCGTTACTGACTCGCTACCTTCGA |
| | | ATTCACCCCCAGAGTTGGGTGCACCAGATTGCCCTGAGGATGG |
| | | AGGTTCTGGGCTGCGAGGCACAGGACCTCTACGGCGCCGGAT |
| | | CACCTGGGGCCGAAACGGCCGAACAAAAACTCATCTCAGAAG |
| | | AGGATCTGTCACCTGCAACCGGTTGA |
| pBC0173 | MQIELSTCFFLCLLRF | ATGCAAATAGAGCTCTCCACCTGCTTCTTTCTGTGCCTTTTGCG |
| | CFSATRRYYLGAVEL | ATTCTGCTTTAGTGCCACCAGAAGATACTACCTGGGTGCAGTG |
| | SWDYMQSDLGELPV | GAACTGTCATGGGACTATATGCAAAGTGATCTCGGTGAGCTGC |
| | DARFPPRVPKSFPFNT | CTGTGGACGCAAGATTTCCTCCTAGAGTGCCAAAATCTTTTCC |
| | SVVYKKTLFVEFTDH | ATTCAACACCTCAGTCGTGTACAAAAAGACTCTGTTTGTAGAA |
| | LFNIAKPRPPWMGLL | TTCACGGATCACCTTTTCAACATCGCTAAGCCAAGGCCACCCT |
| | GPTIQAEVYDTVVITL | GGATGGGTCTGCTAGGTCCTACCATCCAGGCTGAGGTTTATGA |
| | KNMASHPVSLHAVG | TACAGTGGTCATTACACTTAAGAACATGGCTTCCCATCCTGTC |
| | VSYWKASEGAEYDD | AGTCTTCATGCTGTTGGTGTATCCTACTGGAAAGCTTCTGAGG |
| | QTSQREKEDDKVFPG | GAGCTGAATATGATGATCAGACCAGTCAAAGGGAGAAAGAAG |
| | GSHTYVWQVLKENG | ATGATAAAGTCTTCCCTGGTGGAAGCCATACATATGTCTGGCA |
| | PMASDPLCLTYSYLS | GGTCCTGAAAGAGAATGGTCCAATGGCCTCTGACCCACTGTGC |
| | HVDLVKDLNSGLIGA | CTTACCTACTCATATCTTTCTCATGTGGACCTGGTAAAAGACTT |
| | LLVCREGSLAKEKTQ | GAATTCAGGCCTCATTGGAGCCCTACTAGTATGTAGAGAAGGG |
| | TLHKFILLFAVFDEGK | AGTCTGGCCAAGGAAAAGACACAGACCTTGCACAAATTTATA |
| | SWHSETKNSLMQDR | CTACTTTTTGCTGTATTTGATGAAGGGAAAAGTTGGCACTCAG |
| | DAASARAWPKMHTV | AAACAAAGAACTCCTTGATGCAGGATAGGGATGCTGCATCTG |
| | NGYVNRSLPGLIGCH | CTCGGGCCTGGCCTAAAATGCACACAGTCAATGGTTATGTAAA |
| | RKSVYWHVIGMGTT | CAGGTCTCTGCCAGGTCTGATTGGATGCCACAGGAAATCAGTC |
| | PEVHSIFLEGHTFLVR | TATTGGCATGTGATTGGAATGGGCACCACTCCTGAAGTGCACT |
| | NHRQASLEISPITFLT | CAATATTCCTCGAAGGTCACACATTTCTTGTGAGGAACCATCG |
| | AQTLLMDLGQFLLFC | CCAGGCTAGCTTGGAAATCTCGCCAATAACTTTCCTTACTGCT |
| | HISSHQHDGMEAYVK | CAAACACTCTTGATGGACCTTGGACAGTTTCTACTGTTTTGTCA |
| | VDSCPEEPQLRMKNN | TATCTCTTCCCACCAACATGATGGCATGGAAGCTTATGTCAAA |
| | EEAEDYDDDLTDSEM | GTAGACAGCTGTCCAGAGGAACCCCAACTACGAATGAAAAAT |
| | DVVRFDDDNSPSFIQI | AATGAAGAAGCGGAAGACTATGATGATGATCTTACTGATTCTG |
| | RSVAKKHPKTWVHYI | AAATGGATGTGGTCAGGTTTGATGATGACAACTCTCCTTCCTT |
| | AAEEEDWDYAPLVL | TATCCAAATTCGCTCAGTTGCCAAGAAGCATCCTAAAACTTGG |
| | APDDRSYKSQYLNNG | GTACATTACATTGCTGCTGAAGAGGAGGACTGGGACTATGCTC |
| | PQRIGRKYKKVRFMA | CCTTAGTCCTCGCCCCCGATGACAGAAGTTATAAAAGTCAATA |
| | YTDETFKTREAIQHES | TTTGAACAATGGCCCTCAGCGGATTGGTAGGAAGTACAAAAA |
| | GILGPLLYGEVGDTL | AGTCCGATTTATGGCATACACAGATGAAACCTTTAAGACTCGT |
| | LIIFKNQASRPYNIYP | GAAGCTATTCAGCATGAATCAGGAATCTTGGGACCTTTACTTT |
| | HGITDVRPLYSRRLPK | ATGGGGAAGTTGGAGACACACTGTTGATTATATTTAAGAATCA |
| | GVKHLKDFPILPGEIF | AGCAAGCAGACCATATAACATCTACCCTCACGGAATCACTGAT |
| | KYKWTVTVEDGPTK | GTCCGTCCTTTGTATTCAAGGAGATTACCAAAAGGTGTAAAAC |
| | SDPRCLTRYYSSFVN | ATTTGAAGGATTTTCCAATTCTGCCAGGAGAAATATTCAAATA |
| | MERDLASGLIGPLLIC | TAAATGGACAGTGACTGTAGAAGATGGGCCAACTAAATCAGA |
| | YKESVDQRGNQIMSD | TCCTCGGTGCCTGACCCGCTATTACTCTAGTTTCGTTAATATGG |
| | KRNVILFSVFDENRS | AGAGAGATCTAGCTTCAGGACTCATTGGCCCTCTCCTCATCTG |
| | WYLTENIQRFLPNPA | CTACAAAGAATCTGTAGATCAAAGAGGAAACCAGATAATGTC |
| | GVQLEDPEFQASNIM | AGACAAGAGGAATGTCATCCTGTTTTCTGTATTTGATGAGAAC |
| | HSINGYVFDSLQLSV | CGAAGCTGGTACCTCACAGAGAATATACAACGCTTTCTCCCCA |
| | CLHEVAYWYILSIGA | ATCCAGCTGGAGTGCAGCTTGAGGATCCAGAGTTCCAAGCCTC |
| | QTDFLSVFFSGYTFK | CAACATCATGCACAGCATCAATGGCTATGTTTTTGATAGTTTG |
| | HKMVYEDTLTLFPFS | CAGTTGTCAGTTTGTTTGCATGAGGTGGCATACTGGTACATTCT |
| | GETVFMSMENPGLWI | AAGCATTGGAGCACAGACTGACTTCCTTTCTGTCTTCTTCTCTG |
| | LGCHNSDFRNRGMT | GATATACCTTCAAACACAAAATGGTCTATGAAGACACACTCAC |
| | ALLKVSSCDKNTGDY | CCTATTCCCATTCTCAGGAGAAACTGTCTTCATGTCGATGGAA |
| | YEDSYEDISAYLLSK | AACCCAGGTCTATGGATTCTGGGGTGCCACAACTCAGACTTTC |
| | NNAIEPRSFSQNPPVL | GGAACAGAGGCATGACCGCCTTACTGAAGGTTTCTAGTTGTGA |
| | KRHQREITRTTLQSD | CAAGAACACTGGTGATTATTACGAGGACAGTTATGAAGATATT |
| | QEEIDYDDTISVEMK | TCAGCATACTTGCTGAGTAAAAACAATGCCATTGAACCAAGA |
| | KEDFDIYDEDENQSP | AGCTTCTCTCAAAACCCACCAGTCTTGAAACGCCATCAACGGG |
| | RSFQKKTRHYFIAAV | AAATAACTCGTACTACTCTTCAGTCAGATCAAGAGGAAATCGA |
| | ERLWDYGMSSSPHVL | TTATGATGATACCATATCAGTTGAAATGAAGAAGGAAGATTTT |
| | RNRAQSGSVPQFKKV | GACATTTATGATGAGGATGAAAATCAGAGCCCCCGCAGCTTTC |
| | VFQEFTDGSFTQPLY | AAAAGAAAACACGACACTATTTTATTGCTGCAGTGGAGAGGC |
| | RGELNEHLGLLGPYI | TCTGGGATTATGGGATGAGTAGCTCCCCACATGTTCTAAGAAA |
| | RAEVEDNIMVTFRNQ | CAGGGCTCAGAGTGGCAGTGTCCCTCAGTTCAAGAAAGTTGTT |
| | ASRPYSFYSSLISYEE | TTCCAGGAATTTACTGATGGCTCCTTTACTCAGCCCTTATACCG |
| | DQRQGAEPRKNFVKP | TGGAGAACTAAATGAACATTTGGGACTCCTGGGGCCATATATA |
| | NETKTYFWKVQHHM | AGAGCAGAAGTTGAAGATAATATCATGGTAACTTTCAGAAAT |
| | APTKGAPGSPAGSPTS | CAGGCCTCTCGTCCCTATTCCTTCTATTCTAGCCTTATTTCTTAT |
| | TEEGTSESATPESGPG | GAGGAAGATCAGAGGCAAGGAGCAGAACCTAGAAAAAACTTT |
| | SEPATSGSETPASSDE | GTCAAGCCTAATGAAACCAAAACTTACTTTTGGAAAGTGCAAC |
| | FDCKAWAYFSDVDL | ATCATATGGCACCCACTAAAGGCGCGCCAGGTTCTCCTGCTGG |
| | EKDVHSGLIGPLLVC | CTCCCCCACCTCAACAGAAGAGGGGACAAGCGAAAGCGCTAC |
| | HTNTLNPAHGRQVTV | GCCTGAGAGTGGCCCTGGCTCTGAGCCAGCCACCTCCGGCTCT |
| | QEFALFFTIFDETKSW | GAAACCCCTGCCTCGAGCGATGAGTTTGACTGCAAAGCCTGGG |
| | YFTENMERNCRAPCN | CTTATTTCTCTGATGTTGACCTGGAAAAAGATGTGCACTCAGG |
| | IQMEDPTFKENYRFH | CCTGATTGGACCCCTTCTGGTCTGCCACACTAACACACTGAAC |
| | AINGYIMDTLPGLVM | CCTGCTCATGGGAGACAAGTGACAGTACAGGAATTTGCTCTGT |
| | AQDQPIRWYLLSMGS | TTTTCACCATCTTTGATGAGACCAAAAGCTGGTACTTCACTGA |
| | NENIHSIHFSGHVFTV | AAATATGGAAAGAAACTGCAGGGCTCCCTGCAATATCCAGAT |
| | RKKEEYKMALYNLY | GGAAGATCCCACTTTTAAAGAGAATTATCGCTTCCATGCAATC |
| | PGVFETVEMLPSKAG | AATGGCTACATAATGGATACACTACCTGGCTTAGTAATGGCTC |
| | IWRVECLIGEHLHAG | AGGATCAAAGGATTCGATGGTATCTGCTCAGCATGGGCAGCA |
| | MSTLFLVYSNKCQTP | ATGAAAACATCCATTCTATTCATTTCAGTGGACATGTGTTCACT |
| | LGMASGHIRDFQITAS | GTACGAAAAAAAGAGGAGTATAAAATGGCACTGTACAATCTC |
| | GQYGQWAPKLARLH | TATCCAGGTGTTTTTGAGACAGTGGAAATGTTACCATCCAAAG |
| | YSGSINAWSTKEPFS | CTGGAATTTGGCGGGTGGAATGCCTTATTGGCGAGCATCTACA |
| | WIKVDLLAPMIIHGIK | TGCTGGGATGAGCACACTTTTTCTGGTGTACAGCAATAAGTGT |
| | TQGARQKFSSLYISQF | CAGACTCCCCTGGGAATGGCTTCTGGACACATTAGAGATTTTC |
| | IIMYSLDGKKWQTYR | AGATTACAGCTTCAGGACAATATGGACAGTGGGCCCCAAAGC |
| | GNSTGTLMVFFGNVD | TGGCCAGACTTCATTATTCCGGATCAATCAATGCCTGGAGCAC |
| | SSGIKHNIFNPPIIARYI | CAAGGAGCCCTTTTCTTGGATCAAGGTGGATCTGTTGGCACCA |
| | RLHPTHYSIRSTLRME | ATGATTATTCACGGCATCAAGACCCAGGGTGCCCGTCAGAAGT |
| | LMGCDLNSCSMPLG | TCTCCAGCCTCTACATCTCTCAGTTTATCATCATGTATAGTCTT |
| | MESKAISDAQITASSY | GATGGGAAGAAGTGGCAGACTTATCGAGGAAATTCCACTGGA |
| | FTNMFATWSPSKARL | ACCTTAATGGTCTTCTTTGGCAATGTGGATTCATCTGGGATAA |
| | HLQGRSNAWRPQVN | AACACAATATTTTTAACCCTCCAATTATTGCTCGATACATCCGT |
| | NPKEWLQVDFQKTM | TTGCACCCAACTCATTATAGCATTCGCAGCACTCTTCGCATGG |
| | KVTGVTTQGVKSLLT | AGTTGATGGGCTGTGATTTAAATAGTTGCAGCATGCCATTGGG |
| | SMYVKEFLISSSQDG | AATGGAGAGTAAAGCAATATCAGATGCACAGATTACTGCTTC |
| | HQWTLFFQNGKVKV | ATCCTACTTTACCAATATGTTTGCCACCTGGTCTCCTTCAAAAG |
| | FQGNQDSFTPVVNSL | CTCGACTTCACCTCCAAGGGAGGAGTAATGCCTGGAGACCTCA |
| | DPPLLTRYLRIHPQSW | GGTGAATAATCCAAAAGAGTGGCTGCAAGTGGACTTCCAGAA |
| | VHQIALRMEVLGCEA | GACAATGAAAGTCACAGGAGTAACTACTCAGGGAGTAAAATC |
| | QDLYGAGSPGAETAE | TCTGCTTACCAGCATGTATGTGAAGGAGTTCCTCATCTCCAGC |
| | QKLISEEDLSPATG | AGTCAAGATGGCCATCAGTGGACTCTCTTTTTTCAGAATGGCA |
| | | AAGTAAAGGTTTTTCAGGGAAATCAAGACTCCTTCACACCTGT |
| | | GGTGAACTCTCTAGACCCACCGTTACTGACTCGCTACCTTCGA |
| | | ATTCACCCCCAGAGTTGGGTGCACCAGATTGCCCTGAGGATGG |
| | | AGGTTCTGGGCTGCGAGGCACAGGACCTCTACGGCGCCGGAT |
| | | CACCTGGGGCCGAAACGGCCGAACAAAAACTCATCTCAGAAG |
| | | AGGATCTGTCACCTGCAACCGGTTGA |
| pBC0174 | MQIELSTCFFLCLLRF | ATGCAAATAGAGCTCTCCACCTGCTTCTTTCTGTGCCTTTTGCG |
| | CFSATRRYYLGAVEL | ATTCTGCTTTAGTGCCACCAGAAGATACTACCTGGGTGCAGTG |
| | SWDYMQSDLGELPV | GAACTGTCATGGGACTATATGCAAAGTGATCTCGGTGAGCTGC |
| | DARFPPRVPKSFPFNT | CTGTGGACGCAAGATTTCCTCCTAGAGTGCCAAAATCTTTTCC |
| | SVVYKKTLFVEFTDH | ATTCAACACCTCAGTCGTGTACAAAAAGACTCTGTTTGTAGAA |
| | LFNIAKPRPPWMGLL | TTCACGGATCACCTTTTCAACATCGCTAAGCCAAGGCCACCCT |
| | GPTIQAEVYDTVVITL | GGATGGGTCTGCTAGGTCCTACCATCCAGGCTGAGGTTTATGA |
| | KNMASHPVSLHAVG | TACAGTGGTCATTACACTTAAGAACATGGCTTCCCATCCTGTC |
| | VSYWKASEGAEYDD | AGTCTTCATGCTGTTGGTGTATCCTACTGGAAAGCTTCTGAGG |
| | QTSQREKEDDKVFPG | GAGCTGAATATGATGATCAGACCAGTCAAAGGGAGAAAGAAG |
| | GSHTYVWQVLKENG | ATGATAAAGTCTTCCCTGGTGGAAGCCATACATATGTCTGGCA |
| | PMASDPLCLTYSYLS | GGTCCTGAAAGAGAATGGTCCAATGGCCTCTGACCCACTGTGC |
| | HVDLVKDLNSGLIGA | CTTACCTACTCATATCTTTCTCATGTGGACCTGGTAAAAGACTT |
| | LLVCREGSLAKEKTQ | GAATTCAGGCCTCATTGGAGCCCTACTAGTATGTAGAGAAGGG |
| | TLHKFILLFAVFDEGK | AGTCTGGCCAAGGAAAAGACACAGACCTTGCACAAATTTATA |
| | SWHSETKNSLMQDR | CTACTTTTTGCTGTATTTGATGAAGGGAAAAGTTGGCACTCAG |
| | DAASARAWPKMHTV | AAACAAAGAACTCCTTGATGCAGGATAGGGATGCTGCATCTG |
| | NGYVNRSLPGLIGCH | CTCGGGCCTGGCCTAAAATGCACACAGTCAATGGTTATGTAAA |
| | RKSVYWHVIGMGTT | CAGGTCTCTGCCAGGTCTGATTGGATGCCACAGGAAATCAGTC |
| | PEVHSIFLEGHTFLVR | TATTGGCATGTGATTGGAATGGGCACCACTCCTGAAGTGCACT |
| | NHRQASLEISPITFLT | CAATATTCCTCGAAGGTCACACATTTCTTGTGAGGAACCATCG |
| | AQTLLMDLGQFLLFC | CCAGGCTAGCTTGGAAATCTCGCCAATAACTTTCCTTACTGCT |
| | HISSHQHDGMEAYVK | CAAACACTCTTGATGGACCTTGGACAGTTTCTACTGTTTTGTCA |
| | VDSCPEEPQLRMKNN | TATCTCTTCCCACCAACATGATGGCATGGAAGCTTATGTCAAA |
| | EEAEDYDDDLTDSEM | GTAGACAGCTGTCCAGAGGAACCCCAACTACGAATGAAAAAT |
| | DVVRFDDDNSPSFIQI | AATGAAGAAGCGGAAGACTATGATGATGATCTTACTGATTCTG |
| | RSVAKKHPKTWVHYI | AAATGGATGTGGTCAGGTTTGATGATGACAACTCTCCTTCCTT |
| | AAEEEDWDYAPLVL | TATCCAAATTCGCTCAGTTGCCAAGAAGCATCCTAAAACTTGG |
| | APDDRSYKSQYLNNG | GTACATTACATTGCTGCTGAAGAGGAGGACTGGGACTATGCTC |
| | PQRIGRKYKKVRFMA | CCTTAGTCCTCGCCCCCGATGACAGAAGTTATAAAAGTCAATA |
| | YTDETFKTREAIQHES | TTTGAACAATGGCCCTCAGCGGATTGGTAGGAAGTACAAAAA |
| | GILGPLLYGEVGDTL | AGTCCGATTTATGGCATACACAGATGAAACCTTTAAGACTCGT |
| | LIIFKNQASRPYNIYP | GAAGCTATTCAGCATGAATCAGGAATCTTGGGACCTTTACTTT |
| | HGITDVRPLYSRRLPK | ATGGGGAAGTTGGAGACACACTGTTGATTATATTTAAGAATCA |
| | GVKHLKDFPILPGEIF | AGCAAGCAGACCATATAACATCTACCCTCACGGAATCACTGAT |
| | KYKWTVTVEDGPTK | GTCCGTCCTTTGTATTCAAGGAGATTACCAAAAGGTGTAAAAC |
| | SDPRCLTRYYSSFVN | ATTTGAAGGATTTTCCAATTCTGCCAGGAGAAATATTCAAATA |
| | MERDLASGLIGPLLIC | TAAATGGACAGTGACTGTAGAAGATGGGCCAACTAAATCAGA |
| | YKESVDQRGNQIMSD | TCCTCGGTGCCTGACCCGCTATTACTCTAGTTTCGTTAATATGG |
| | KRNVILFSVFDENRS | AGAGAGATCTAGCTTCAGGACTCATTGGCCCTCTCCTCATCTG |
| | WYLTENIQRFLPNPA | CTACAAAGAATCTGTAGATCAAAGAGGAAACCAGATAATGTC |
| | GVQLEDPEFQASNIM | AGACAAGAGGAATGTCATCCTGTTTTCTGTATTTGATGAGAAC |
| | HSINGYVFDSLQLSV | CGAAGCTGGTACCTCACAGAGAATATACAACGCTTTCTCCCCA |
| | CLHEVAYWYILSIGA | ATCCAGCTGGAGTGCAGCTTGAGGATCCAGAGTTCCAAGCCTC |
| | QTDFLSVFFSGYTFK | CAACATCATGCACAGCATCAATGGCTATGTTTTTGATAGTTTG |
| | HKMVYEDTLTLFPFS | CAGTTGTCAGTTTGTTTGCATGAGGTGGCATACTGGTACATTCT |
| | GETVFMSMENPGLWI | AAGCATTGGAGCACAGACTGACTTCCTTTCTGTCTTCTTCTCTG |
| | LGCHNSDFRNRGMT | GATATACCTTCAAACACAAAATGGTCTATGAAGACACACTCAC |
| | ALLKVSSCDKNTGDY | CCTATTCCCATTCTCAGGAGAAACTGTCTTCATGTCGATGGAA |
| | YEDSYEDISAYLLSK | AACCCAGGTCTATGGATTCTGGGGTGCCACAACTCAGACTTTC |
| | NNAIEPRSFSQNPPVL | GGAACAGAGGCATGACCGCCTTACTGAAGGTTTCTAGTTGTGA |
| | KRHQREITRTTLQSD | CAAGAACACTGGTGATTATTACGAGGACAGTTATGAAGATATT |
| | QEEIDYDDTISVEMK | TCAGCATACTTGCTGAGTAAAAACAATGCCATTGAACCAAGA |
| | KEDFDIYDEDENQSP | AGCTTCTCTCAAAACCCACCAGTCTTGAAACGCCATCAACGGG |
| | RSFQKKTRHYFIAAV | AAATAACTCGTACTACTCTTCAGTCAGATCAAGAGGAAATCGA |
| | ERLWDYGMSSSPHVL | TTATGATGATACCATATCAGTTGAAATGAAGAAGGAAGATTTT |
| | RNRAQSGSVPQFKKV | GACATTTATGATGAGGATGAAAATCAGAGCCCCCGCAGCTTTC |
| | VFQEFTDGSFTQPLY | AAAAGAAAACACGACACTATTTTATTGCTGCAGTGGAGAGGC |
| | RGELNEHLGLLGPYI | TCTGGGATTATGGGATGAGTAGCTCCCCACATGTTCTAAGAAA |
| | RAEVEDNIMVTFRNQ | CAGGGCTCAGAGTGGCAGTGTCCCTCAGTTCAAGAAAGTTGTT |
| | ASRPYSFYSSLISYEE | TTCCAGGAATTTACTGATGGCTCCTTTACTCAGCCCTTATACCG |
| | DQRQGAEPRKNFVKP | TGGAGAACTAAATGAACATTTGGGACTCCTGGGGCCATATATA |
| | NETKTYFWKVQHHM | AGAGCAGAAGTTGAAGATAATATCATGGTAACTTTCAGAAAT |
| | APTKDEFDCKAWAY | CAGGCCTCTCGTCCCTATTCCTTCTATTCTAGCCTTATTTCTTAT |
| | FSDVDLEKDVHSGLI | GAGGAAGATCAGAGGCAAGGAGCAGAACCTAGAAAAAACTTT |
| | GPLLVCHTNGAPGSP | GTCAAGCCTAATGAAACCAAAACTTACTTTTGGAAAGTGCAAC |
| | AGSPTSTEEGTSESAT | ATCATATGGCACCCACTAAAGATGAGTTTGACTGCAAAGCCTG |
| | PESGPGSEPATSGSET | GGCTTATTTCTCTGATGTTGACCTGGAAAAAGATGTGCACTCA |
| | PASSTLNPAHGRQVT | GGCCTGATTGGACCCCTTCTGGTCTGCCACACTAACGGCGCGC |
| | VQEFALFFTIFDETKS | CAGGTTCTCCTGCTGGCTCCCCCACCTCAACAGAAGAGGGGAC |
| | WYFTENMERNCRAP | AAGCGAAAGCGCTACGCCTGAGAGTGGCCCTGGCTCTGAGCC |
| | CNIQMEDPTFKENYR | AGCCACCTCCGGCTCTGAAACCCCTGCCTCGAGCACACTGAAC |
| | FHAINGYIMDTLPGL | CCTGCTCATGGGAGACAAGTGACAGTACAGGAATTTGCTCTGT |
| | VMAQDQRIRWYLLS | TTTTCACCATCTTTGATGAGACCAAAAGCTGGTACTTCACTGA |
| | MGSNENIHSIHFSGHV | AAATATGGAAAGAAACTGCAGGGCTCCCTGCAATATCCAGAT |
| | FTVRKKEEYKMALY | GGAAGATCCCACTTTTAAAGAGAATTATCGCTTCCATGCAATC |
| | NLYPGVFETVEMLPS | AATGGCTACATAATGGATACACTACCTGGCTTAGTAATGGCTC |
| | KAGIWRVECLIGEHL | AGGATCAAAGGATTCGATGGTATCTGCTCAGCATGGGCAGCA |
| | HAGMSTLFLVYSNKC | ATGAAAACATCCATTCTATTCATTTCAGTGGACATGTGTTCACT |
| | QTPLGMASGHIRDFQI | GTACGAAAAAAAGAGGAGTATAAAATGGCACTGTACAATCTC |
| | TASGQYGQWAPKLA | TATCCAGGTGTTTTTGAGACAGTGGAAATGTTACCATCCAAAG |
| | RLHYSGSINAWSTKE | CTGGAATTTGGCGGGTGGAATGCCTTATTGGCGAGCATCTACA |
| | PFSWIKVDLLAPMIIH | TGCTGGGATGAGCACACTTTTTCTGGTGTACAGCAATAAGTGT |
| | GIKTQGARQKFSSLYI | CAGACTCCCCTGGGAATGGCTTCTGGACACATTAGAGATTTTC |
| | SQFIIMYSLDGKKWQ | AGATTACAGCTTCAGGACAATATGGACAGTGGGCCCCAAAGC |
| | TYRGNSTGTLMVFFG | TGGCCAGACTTCATTATTCCGGATCAATCAATGCCTGGAGCAC |
| | NVDSSGIKHNIFNPPII | CAAGGAGCCCTTTTCTTGGATCAAGGTGGATCTGTTGGCACCA |
| | ARYIRLHPTHYSIRST | ATGATTATTCACGGCATCAAGACCCAGGGTGCCCGTCAGAAGT |
| | LRMELMGCDLNSCS | TCTCCAGCCTCTACATCTCTCAGTTTATCATCATGTATAGTCTT |
| | MPLGMESKAISDAQI | GATGGGAAGAAGTGGCAGACTTATCGAGGAAATTCCACTGGA |
| | TASSYFTNMFATWSP | ACCTTAATGGTCTTCTTTGGCAATGTGGATTCATCTGGGATAA |
| | SKARLHLQGRSNAW | AACACAATATTTTTAACCCTCCAATTATTGCTCGATACATCCGT |
| | RPQVNNPKEWLQVD | TTGCACCCAACTCATTATAGCATTCGCAGCACTCTTCGCATGG |
| | FQKTMKVTGVTTQG | AGTTGATGGGCTGTGATTTAAATAGTTGCAGCATGCCATTGGG |
| | VKSLLTSMYVKEFLIS | AATGGAGAGTAAAGCAATATCAGATGCACAGATTACTGCTTC |
| | SSQDGHQWTLFFQNG | ATCCTACTTTACCAATATGTTTGCCACCTGGTCTCCTTCAAAAG |
| | KVKVFQGNQDSFTPV | CTCGACTTCACCTCCAAGGGAGGAGTAATGCCTGGAGACCTCA |
| | VNSLDPPLLTRYLRIH | GGTGAATAATCCAAAAGAGTGGCTGCAAGTGGACTTCCAGAA |
| | PQSWVHQIALRMEVL | GACAATGAAAGTCACAGGAGTAACTACTCAGGGAGTAAAATC |
| | GCEAQDLYGAGSPG | TCTGCTTACCAGCATGTATGTGAAGGAGTTCCTCATCTCCAGC |
| | AETAEQKLISEEDLSP | AGTCAAGATGGCCATCAGTGGACTCTCTTTTTTCAGAATGGCA |
| | ATG | AAGTAAAGGTTTTTCAGGGAAATCAAGACTCCTTCACACCTGT |
| | | GGTGAACTCTCTAGACCCACCGTTACTGACTCGCTACCTTCGA |
| | | ATTCACCCCCAGAGTTGGGTGCACCAGATTGCCCTGAGGATGG |
| | | AGGTTCTGGGCTGCGAGGCACAGGACCTCTACGGCGCCGGAT |
| | | CACCTGGGGCCGAAACGGCCGAACAAAAACTCATCTCAGAAG |
| | | AGGATCTGTCACCTGCAACCGGTTGA |
| pBC0175 | MQIELSTCFFLCLLRF | ATGCAAATAGAGCTCTCCACCTGCTTCTTTCTGTGCCTTTTGCG |
| | CFSATRRYYLGAVEL | ATTCTGCTTTAGTGCCACCAGAAGATACTACCTGGGTGCAGTG |
| | SWDYMQSDLGELPV | GAACTGTCATGGGACTATATGCAAAGTGATCTCGGTGAGCTGC |
| | DARFPPRVPKSFPFNT | CTGTGGACGCAAGATTTCCTCCTAGAGTGCCAAAATCTTTTCC |
| | SVVYKKTLFVEFTDH | ATTCAACACCTCAGTCGTGTACAAAAAGACTCTGTTTGTAGAA |
| | LFNIAKPRPPWMGLL | TTCACGGATCACCTTTTCAACATCGCTAAGCCAAGGCCACCCT |
| | GPTIQAEVYDTVVITL | GGATGGGTCTGCTAGGTCCTACCATCCAGGCTGAGGTTTATGA |
| | KNMASHPVSLHAVG | TACAGTGGTCATTACACTTAAGAACATGGCTTCCCATCCTGTC |
| | VSYWKASEGAEYDD | AGTCTTCATGCTGTTGGTGTATCCTACTGGAAAGCTTCTGAGG |
| | QTSQREKEDDKVFPG | GAGCTGAATATGATGATCAGACCAGTCAAAGGGAGAAAGAAG |
| | GSHTYVWQVLKENG | ATGATAAAGTCTTCCCTGGTGGAAGCCATACATATGTCTGGCA |
| | PMASDPLCLTYSYLS | GGTCCTGAAAGAGAATGGTCCAATGGCCTCTGACCCACTGTGC |
| | HVDLVKDLNSGLIGA | CTTACCTACTCATATCTTTCTCATGTGGACCTGGTAAAAGACTT |
| | LLVCREGSLAKEKTQ | GAATTCAGGCCTCATTGGAGCCCTACTAGTATGTAGAGAAGGG |
| | TLHKFILLFAVFDEGK | AGTCTGGCCAAGGAAAAGACACAGACCTTGCACAAATTTATA |
| | SWHSETKNSLMQDR | CTACTTTTTGCTGTATTTGATGAAGGGAAAAGTTGGCACTCAG |
| | DAASARAWPKMHTV | AAACAAAGAACTCCTTGATGCAGGATAGGGATGCTGCATCTG |
| | NGYVNRSLPGLIGCH | CTCGGGCCTGGCCTAAAATGCACACAGTCAATGGTTATGTAAA |
| | RKSVYWHVIGMGTT | CAGGTCTCTGCCAGGTCTGATTGGATGCCACAGGAAATCAGTC |
| | PEVHSIFLEGHTFLVR | TATTGGCATGTGATTGGAATGGGCACCACTCCTGAAGTGCACT |
| | NHRQASLEISPITFLT | CAATATTCCTCGAAGGTCACACATTTCTTGTGAGGAACCATCG |
| | AQTLLMDLGQFLLFC | CCAGGCTAGCTTGGAAATCTCGCCAATAACTTTCCTTACTGCT |
| | HISSHQHDGMEAYVK | CAAACACTCTTGATGGACCTTGGACAGTTTCTACTGTTTTGTCA |
| | VDSCPEEPQLRMKNN | TATCTCTTCCCACCAACATGATGGCATGGAAGCTTATGTCAAA |
| | EEAEDYDDDLTDSEM | GTAGACAGCTGTCCAGAGGAACCCCAACTACGAATGAAAAAT |
| | DVVRFDDDNSPSFIQI | AATGAAGAAGCGGAAGACTATGATGATGATCTTACTGATTCTG |
| | RSVAKKHPKTWVHYI | AAATGGATGTGGTCAGGTTTGATGATGACAACTCTCCTTCCTT |
| | AAEEEDWDYAPLVL | TATCCAAATTCGCTCAGTTGCCAAGAAGCATCCTAAAACTTGG |
| | APDDRSYKSQYLNNG | GTACATTACATTGCTGCTGAAGAGGAGGACTGGGACTATGCTC |
| | PQRIGRKYKKVRFMA | CCTTAGTCCTCGCCCCCGATGACAGAAGTTATAAAAGTCAATA |
| | YTDETFKTREAIQHES | TTTGAACAATGGCCCTCAGCGGATTGGTAGGAAGTACAAAAA |
| | GILGPLLYGEVGDTL | AGTCCGATTTATGGCATACACAGATGAAACCTTTAAGACTCGT |
| | LIIFKNQASRPYNIYP | GAAGCTATTCAGCATGAATCAGGAATCTTGGGACCTTTACTTT |
| | HGITDVRPLYSRRLPK | ATGGGGAAGTTGGAGACACACTGTTGATTATATTTAAGAATCA |
| | GVKHLKDFPILPGEIF | AGCAAGCAGACCATATAACATCTACCCTCACGGAATCACTGAT |
| | KYKWTVTVEDGPTK | GTCCGTCCTTTGTATTCAAGGAGATTACCAAAAGGTGTAAAAC |
| | SDPRCLTRYYSSFVN | ATTTGAAGGATTTTCCAATTCTGCCAGGAGAAATATTCAAATA |
| | MERDLASGLIGPLLIC | TAAATGGACAGTGACTGTAGAAGATGGGCCAACTAAATCAGA |
| | YKESVDQRGNQIMSD | TCCTCGGTGCCTGACCCGCTATTACTCTAGTTTCGTTAATATGG |
| | KRNVILFSVFDENRS | AGAGAGATCTAGCTTCAGGACTCATTGGCCCTCTCCTCATCTG |
| | WYLTENIQRFLPNPA | CTACAAAGAATCTGTAGATCAAAGAGGAAACCAGATAATGTC |
| | GVQLEDPEFQASNIM | AGACAAGAGGAATGTCATCCTGTTTTCTGTATTTGATGAGAAC |
| | HSINGYVFDSLQLSV | CGAAGCTGGTACCTCACAGAGAATATACAACGCTTTCTCCCCA |
| | CLHEVAYWYILSIGA | ATCCAGCTGGAGTGCAGCTTGAGGATCCAGAGTTCCAAGCCTC |
| | QTDFLSVFFSGYTFK | CAACATCATGCACAGCATCAATGGCTATGTTTTTGATAGTTTG |
| | HKMVYEDTLTLFPFS | CAGTTGTCAGTTTGTTTGCATGAGGTGGCATACTGGTACATTCT |
| | GETVFMSMENPGLWI | AAGCATTGGAGCACAGACTGACTTCCTTTCTGTCTTCTTCTCTG |
| | LGCHNSDFRNRGMT | GATATACCTTCAAACACAAAATGGTCTATGAAGACACACTCAC |
| | ALLKVSSCDKNTGDY | CCTATTCCCATTCTCAGGAGAAACTGTCTTCATGTCGATGGAA |
| | YEDSYEDISAYLLSK | AACCCAGGTCTATGGATTCTGGGGTGCCACAACTCAGACTTTC |
| | NNAIEPRSFSQNPPVL | GGAACAGAGGCATGACCGCCTTACTGAAGGTTTCTAGTTGTGA |
| | KRHQREITRTTLQSD | CAAGAACACTGGTGATTATTACGAGGACAGTTATGAAGATATT |
| | QEEIDYDDTISVEMK | TCAGCATACTTGCTGAGTAAAAACAATGCCATTGAACCAAGA |
| | KEDFDIYDEDENQSP | AGCTTCTCTCAAAACCCACCAGTCTTGAAACGCCATCAACGGG |
| | RSFQKKTRHYFIAAV | AAATAACTCGTACTACTCTTCAGTCAGATCAAGAGGAAATCGA |
| | ERLWDYGMSSSPHVL | TTATGATGATACCATATCAGTTGAAATGAAGAAGGAAGATTTT |
| | RNRAQSGSVPQFKKV | GACATTTATGATGAGGATGAAAATCAGAGCCCCCGCAGCTTTC |
| | VFQEFTDGSFTQPLY | AAAAGAAAACACGACACTATTTTATTGCTGCAGTGGAGAGGC |
| | RGELNEHLGLLGPYI | TCTGGGATTATGGGATGAGTAGCTCCCCACATGTTCTAAGAAA |
| | RAEVEDNIMVTFRNQ | CAGGGCTCAGAGTGGCAGTGTCCCTCAGTTCAAGAAAGTTGTT |
| | ASRPYSFYSSLISYEE | TTCCAGGAATTTACTGATGGCTCCTTTACTCAGCCCTTATACCG |
| | DQRQGAEPRKNFVKP | TGGAGAACTAAATGAACATTTGGGACTCCTGGGGCCATATATA |
| | NETKTYFWKVQHHM | AGAGCAGAAGTTGAAGATAATATCATGGTAACTTTCAGAAAT |
| | APTKDEFDCKAWAY | CAGGCCTCTCGTCCCTATTCCTTCTATTCTAGCCTTATTTCTTAT |
| | FSDVDLEKDVHSGLI | GAGGAAGATCAGAGGCAAGGAGCAGAACCTAGAAAAAACTTT |
| | GPLLVCHTNTLNPAH | GTCAAGCCTAATGAAACCAAAACTTACTTTTGGAAAGTGCAAC |
| | GRQVTVQEFALFFTIF | ATCATATGGCACCCACTAAAGATGAGTTTGACTGCAAAGCCTG |
| | DETKSWYFTENMEG | GGCTTATTTCTCTGATGTTGACCTGGAAAAAGATGTGCACTCA |
| | APGSPAGSPTSTEEGT | GGCCTGATTGGACCCCTTCTGGTCTGCCACACTAACACACTGA |
| | SESATPESGPGSEPAT | ACCCTGCTCATGGGAGACAAGTGACAGTACAGGAATTTGCTCT |
| | SGSETPASSRNCRAPC | GTTTTTCACCATCTTTGATGAGACCAAAAGCTGGTACTTCACT |
| | NIQMEDPTFKENYRF | GAAAATATGGAAGGCGCGCCAGGTTCTCCTGCTGGCTCCCCCA |
| | HAINGYIMDTLPGLV | CCTCAACAGAAGAGGGGACAAGCGAAAGCGCTACGCCTGAGA |
| | MAQDQRIRWYLLSM | GTGGCCCTGGCTCTGAGCCAGCCACCTCCGGCTCTGAAACCCC |
| | GSNENIHSIHFSGHVF | TGCCTCGAGCAGAAACTGCAGGGCTCCCTGCAATATCCAGATG |
| | TVRKKEEYKMALYN | GAAGATCCCACTTTTAAAGAGAATTATCGCTTCCATGCAATCA |
| | LYPGVFETVEMLPSK | ATGGCTACATAATGGATACACTACCTGGCTTAGTAATGGCTCA |
| | AGIWRVECLIGEHLH | GGATCAAAGGATTCGATGGTATCTGCTCAGCATGGGCAGCAAT |
| | AGMSTLFLVYSNKCQ | GAAAACATCCATTCTATTCATTTCAGTGGACATGTGTTCACTGT |
| | TPLGMASGHIRDFQIT | ACGAAAAAAAGAGGAGTATAAAATGGCACTGTACAATCTCTA |
| | ASGQYGQWAPKLAR | TCCAGGTGTTTTTGAGACAGTGGAAATGTTACCATCCAAAGCT |
| | LHYSGSINAWSTKEP | GGAATTTGGCGGGTGGAATGCCTTATTGGCGAGCATCTACATG |
| | FSWIKVDLLAPMIIHG | CTGGGATGAGCACACTTTTTCTGGTGTACAGCAATAAGTGTCA |
| | IKTQGARQKFSSLYIS | GACTCCCCTGGGAATGGCTTCTGGACACATTAGAGATTTTCAG |
| | QFIIMYSLDGKKWQT | ATTACAGCTTCAGGACAATATGGACAGTGGGCCCCAAAGCTG |
| | YRGNSTGTLMVFFGN | GCCAGACTTCATTATTCCGGATCAATCAATGCCTGGAGCACCA |
| | VDSSGIKHNIFNPPIIA | AGGAGCCCTTTTCTTGGATCAAGGTGGATCTGTTGGCACCAAT |
| | RYIRLHPTHYSIRSTL | GATTATTCACGGCATCAAGACCCAGGGTGCCCGTCAGAAGTTC |
| | RMELMGCDLNSCSM | TCCAGCCTCTACATCTCTCAGTTTATCATCATGTATAGTCTTGA |
| | PLGMESKAISDAQITA | TGGGAAGAAGTGGCAGACTTATCGAGGAAATTCCACTGGAAC |
| | SSYFTNMFATWSPSK | CTTAATGGTCTTCTTTGGCAATGTGGATTCATCTGGGATAAAA |
| | ARLHLQGRSNAWRP | CACAATATTTTTAACCCTCCAATTATTGCTCGATACATCCGTTT |
| | QVNNPKEWLQVDFQ | GCACCCAACTCATTATAGCATTCGCAGCACTCTTCGCATGGAG |
| | KTMKVTGVTTQGVK | TTGATGGGCTGTGATTTAAATAGTTGCAGCATGCCATTGGGAA |
| | SLLTSMYVKEFLISSS | TGGAGAGTAAAGCAATATCAGATGCACAGATTACTGCTTCATC |
| | QDGHQWTLFFQNGK | CTACTTTACCAATATGTTTGCCACCTGGTCTCCTTCAAAAGCTC |
| | VKVFQGNQDSFTPVV | GACTTCACCTCCAAGGGAGGAGTAATGCCTGGAGACCTCAGG |
| | NSLDPPLLTRYLRIHP | TGAATAATCCAAAAGAGTGGCTGCAAGTGGACTTCCAGAAGA |
| | QSWVHQIALRMEVL | CAATGAAAGTCACAGGAGTAACTACTCAGGGAGTAAAATCTC |
| | GCEAQDLYGAGSPG | TGCTTACCAGCATGTATGTGAAGGAGTTCCTCATCTCCAGCAG |
| | AETAEQKLISEEDLSP | TCAAGATGGCCATCAGTGGACTCTCTTTTTTCAGAATGGCAAA |
| | ATG | GTAAAGGTTTTTCAGGGAAATCAAGACTCCTTCACACCTGTGG |
| | | TGAACTCTCTAGACCCACCGTTACTGACTCGCTACCTTCGAATT |
| | | CACCCCCAGAGTTGGGTGCACCAGATTGCCCTGAGGATGGAG |
| | | GTTCTGGGCTGCGAGGCACAGGACCTCTACGGCGCCGGATCAC |
| | | CTGGGGCCGAAACGGCCGAACAAAAACTCATCTCAGAAGAGG |
| | | ATCTGTCACCTGCAACCGGTTGA |
| pBC0176 | MQIELSTCFFLCLLRF | ATGCAAATAGAGCTCTCCACCTGCTTCTTTCTGTGCCTTTTGCG |
| | CFSATRRYYLGAVEL | ATTCTGCTTTAGTGCCACCAGAAGATACTACCTGGGTGCAGTG |
| | SWDYMQSDLGELPV | GAACTGTCATGGGACTATATGCAAAGTGATCTCGGTGAGCTGC |
| | DARFPPRVPKSFPFNT | CTGTGGACGCAAGATTTCCTCCTAGAGTGCCAAAATCTTTTCC |
| | SVVYKKTLFVEFTDH | ATTCAACACCTCAGTCGTGTACAAAAAGACTCTGTTTGTAGAA |
| | LFNIAKPRPPWMGLL | TTCACGGATCACCTTTTCAACATCGCTAAGCCAAGGCCACCCT |
| | GPTIQAEVYDTVVITL | GGATGGGTCTGCTAGGTCCTACCATCCAGGCTGAGGTTTATGA |
| | KNMASHPVSLHAVG | TACAGTGGTCATTACACTTAAGAACATGGCTTCCCATCCTGTC |
| | VSYWKASEGAEYDD | AGTCTTCATGCTGTTGGTGTATCCTACTGGAAAGCTTCTGAGG |
| | QTSQREKEDDKVFPG | GAGCTGAATATGATGATCAGACCAGTCAAAGGGAGAAAGAAG |
| | GSHTYVWQVLKENG | ATGATAAAGTCTTCCCTGGTGGAAGCCATACATATGTCTGGCA |
| | PMASDPLCLTYSYLS | GGTCCTGAAAGAGAATGGTCCAATGGCCTCTGACCCACTGTGC |
| | HVDLVKDLNSGLIGA | CTTACCTACTCATATCTTTCTCATGTGGACCTGGTAAAAGACTT |
| | LLVCREGSLAKEKTQ | GAATTCAGGCCTCATTGGAGCCCTACTAGTATGTAGAGAAGGG |
| | TLHKFILLFAVFDEGK | AGTCTGGCCAAGGAAAAGACACAGACCTTGCACAAATTTATA |
| | SWHSETKNSLMQDR | CTACTTTTTGCTGTATTTGATGAAGGGAAAAGTTGGCACTCAG |
| | DAASARAWPKMHTV | AAACAAAGAACTCCTTGATGCAGGATAGGGATGCTGCATCTG |
| | NGYVNRSLPGLIGCH | CTCGGGCCTGGCCTAAAATGCACACAGTCAATGGTTATGTAAA |
| | RKSVYWHVIGMGTT | CAGGTCTCTGCCAGGTCTGATTGGATGCCACAGGAAATCAGTC |
| | PEVHSIFLEGHTFLVR | TATTGGCATGTGATTGGAATGGGCACCACTCCTGAAGTGCACT |
| | NHRQASLEISPITFLT | CAATATTCCTCGAAGGTCACACATTTCTTGTGAGGAACCATCG |
| | AQTLLMDLGQFLLFC | CCAGGCTAGCTTGGAAATCTCGCCAATAACTTTCCTTACTGCT |
| | HISSHQHDGMEAYVK | CAAACACTCTTGATGGACCTTGGACAGTTTCTACTGTTTTGTCA |
| | VDSCPEEPQLRMKNN | TATCTCTTCCCACCAACATGATGGCATGGAAGCTTATGTCAAA |
| | EEAEDYDDDLTDSEM | GTAGACAGCTGTCCAGAGGAACCCCAACTACGAATGAAAAAT |
| | DVVRFDDDNSPSFIQI | AATGAAGAAGCGGAAGACTATGATGATGATCTTACTGATTCTG |
| | RSVAKKHPKTWVHYI | AAATGGATGTGGTCAGGTTTGATGATGACAACTCTCCTTCCTT |
| | AAEEEDWDYAPLVL | TATCCAAATTCGCTCAGTTGCCAAGAAGCATCCTAAAACTTGG |
| | APDDRSYKSQYLNNG | GTACATTACATTGCTGCTGAAGAGGAGGACTGGGACTATGCTC |
| | PQRIGRKYKKVRFMA | CCTTAGTCCTCGCCCCCGATGACAGAAGTTATAAAAGTCAATA |
| | YTDETFKTREAIQHES | TTTGAACAATGGCCCTCAGCGGATTGGTAGGAAGTACAAAAA |
| | GILGPLLYGEVGDTL | AGTCCGATTTATGGCATACACAGATGAAACCTTTAAGACTCGT |
| | LIIFKNQASRPYNIYP | GAAGCTATTCAGCATGAATCAGGAATCTTGGGACCTTTACTTT |
| | HGITDVRPLYSRRLPK | ATGGGGAAGTTGGAGACACACTGTTGATTATATTTAAGAATCA |
| | GVKHLKDFPILPGEIF | AGCAAGCAGACCATATAACATCTACCCTCACGGAATCACTGAT |
| | KYKWTVTVEDGPTK | GTCCGTCCTTTGTATTCAAGGAGATTACCAAAAGGTGTAAAAC |
| | SDPRCLTRYYSSFVN | ATTTGAAGGATTTTCCAATTCTGCCAGGAGAAATATTCAAATA |
| | MERDLASGLIGPLLIC | TAAATGGACAGTGACTGTAGAAGATGGGCCAACTAAATCAGA |
| | YKESVDQRGNQIMSD | TCCTCGGTGCCTGACCCGCTATTACTCTAGTTTCGTTAATATGG |
| | KRNVILFSVFDENRS | AGAGAGATCTAGCTTCAGGACTCATTGGCCCTCTCCTCATCTG |
| | WYLTENIQRFLPNPA | CTACAAAGAATCTGTAGATCAAAGAGGAAACCAGATAATGTC |
| | GVQLEDPEFQASNIM | AGACAAGAGGAATGTCATCCTGTTTTCTGTATTTGATGAGAAC |
| | HSINGYVFDSLQLSV | CGAAGCTGGTACCTCACAGAGAATATACAACGCTTTCTCCCCA |
| | CLHEVAYWYILSIGA | ATCCAGCTGGAGTGCAGCTTGAGGATCCAGAGTTCCAAGCCTC |
| | QTDFLSVFFSGYTFK | CAACATCATGCACAGCATCAATGGCTATGTTTTTGATAGTTTG |
| | HKMVYEDTLTLFPFS | CAGTTGTCAGTTTGTTTGCATGAGGTGGCATACTGGTACATTCT |
| | GETVFMSMENPGLWI | AAGCATTGGAGCACAGACTGACTTCCTTTCTGTCTTCTTCTCTG |
| | LGCHNSDFRNRGMT | GATATACCTTCAAACACAAAATGGTCTATGAAGACACACTCAC |
| | ALLKVSSCDKNTGDY | CCTATTCCCATTCTCAGGAGAAACTGTCTTCATGTCGATGGAA |
| | YEDSYEDISAYLLSK | AACCCAGGTCTATGGATTCTGGGGTGCCACAACTCAGACTTTC |
| | NNAIEPRSFSQNPPVL | GGAACAGAGGCATGACCGCCTTACTGAAGGTTTCTAGTTGTGA |
| | KRHQREITRTTLQSD | CAAGAACACTGGTGATTATTACGAGGACAGTTATGAAGATATT |
| | QEEIDYDDTISVEMK | TCAGCATACTTGCTGAGTAAAAACAATGCCATTGAACCAAGA |
| | KEDFDIYDEDENQSP | AGCTTCTCTCAAAACCCACCAGTCTTGAAACGCCATCAACGGG |
| | RSFQKKTRHYFIAAV | AAATAACTCGTACTACTCTTCAGTCAGATCAAGAGGAAATCGA |
| | ERLWDYGMSSSPHVL | TTATGATGATACCATATCAGTTGAAATGAAGAAGGAAGATTTT |
| | RNRAQSGSVPQFKKV | GACATTTATGATGAGGATGAAAATCAGAGCCCCCGCAGCTTTC |
| | VFQEFTDGSFTQPLY | AAAAGAAAACACGACACTATTTTATTGCTGCAGTGGAGAGGC |
| | RGELNEHLGLLGPYI | TCTGGGATTATGGGATGAGTAGCTCCCCACATGTTCTAAGAAA |
| | RAEVEDNIMVTFRNQ | CAGGGCTCAGAGTGGCAGTGTCCCTCAGTTCAAGAAAGTTGTT |
| | ASRPYSFYSSLISYEE | TTCCAGGAATTTACTGATGGCTCCTTTACTCAGCCCTTATACCG |
| | DQRQGAEPRKNFVKP | TGGAGAACTAAATGAACATTTGGGACTCCTGGGGCCATATATA |
| | NETKTYFWKVQHHM | AGAGCAGAAGTTGAAGATAATATCATGGTAACTTTCAGAAAT |
| | APTKDEFDCKAWAY | CAGGCCTCTCGTCCCTATTCCTTCTATTCTAGCCTTATTTCTTAT |
| | FSDVDLEKDVHSGLI | GAGGAAGATCAGAGGCAAGGAGCAGAACCTAGAAAAAACTTT |
| | GPLLVCHTNTLNPAH | GTCAAGCCTAATGAAACCAAAACTTACTTTTGGAAAGTGCAAC |
| | GRQVTVQEFALFFTIF | ATCATATGGCACCCACTAAAGATGAGTTTGACTGCAAAGCCTG |
| | DETKSWYFTENMER | GGCTTATTTCTCTGATGTTGACCTGGAAAAAGATGTGCACTCA |
| | NCRGAPGSPAGSPTS | GGCCTGATTGGACCCCTTCTGGTCTGCCACACTAACACACTGA |
| | TEEGTSESATPESGPG | ACCCTGCTCATGGGAGACAAGTGACAGTACAGGAATTTGCTCT |
| | SEPATSGSETPASSAP | GTTTTTCACCATCTTTGATGAGACCAAAAGCTGGTACTTCACT |
| | CNIQMEDPTFKENYR | GAAAATATGGAAAGAAACTGCAGGGGCGCGCCAGGTTCTCCT |
| | FHAINGYIMDTLPGL | GCTGGCTCCCCCACCTCAACAGAAGAGGGGACAAGCGAAAGC |
| | VMAQDQRIRWYLLS | GCTACGCCTGAGAGTGGCCCTGGCTCTGAGCCAGCCACCTCCG |
| | MGSNENIHSIHFSGHV | GCTCTGAAACCCCTGCCTCGAGCGCTCCCTGCAATATCCAGAT |
| | FTVRKKEEYKMALY | GGAAGATCCCACTTTTAAAGAGAATTATCGCTTCCATGCAATC |
| | NLYPGVFETVEMLPS | AATGGCTACATAATGGATACACTACCTGGCTTAGTAATGGCTC |
| | KAGIWRVECLIGEHL | AGGATCAAAGGATTCGATGGTATCTGCTCAGCATGGGCAGCA |
| | HAGMSTLFLVYSNKC | ATGAAAACATCCATTCTATTCATTTCAGTGGACATGTGTTCACT |
| | QTPLGMASGHIRDFQI | GTACGAAAAAAAGAGGAGTATAAAATGGCACTGTACAATCTC |
| | TASGQYGQWAPKLA | TATCCAGGTGTTTTTGAGACAGTGGAAATGTTACCATCCAAAG |
| | RLHYSGSINAWSTKE | CTGGAATTTGGCGGGTGGAATGCCTTATTGGCGAGCATCTACA |
| | PFSWIKVDLLAPMIIH | TGCTGGGATGAGCACACTTTTTCTGGTGTACAGCAATAAGTGT |
| | GIKTQGARQKFSSLYI | CAGACTCCCCTGGGAATGGCTTCTGGACACATTAGAGATTTTC |
| | SQFIIMYSLDGKKWQ | AGATTACAGCTTCAGGACAATATGGACAGTGGGCCCCAAAGC |
| | TYRGNSTGTLMVFFG | TGGCCAGACTTCATTATTCCGGATCAATCAATGCCTGGAGCAC |
| | NVDSSGIKHNIFNPPII | CAAGGAGCCCTTTTCTTGGATCAAGGTGGATCTGTTGGCACCA |
| | ARYIRLHPTHYSIRST | ATGATTATTCACGGCATCAAGACCCAGGGTGCCCGTCAGAAGT |
| | LRMELMGCDLNSCS | TCTCCAGCCTCTACATCTCTCAGTTTATCATCATGTATAGTCTT |
| | MPLGMESKAISDAQI | GATGGGAAGAAGTGGCAGACTTATCGAGGAAATTCCACTGGA |
| | TASSYFTNMFATWSP | ACCTTAATGGTCTTCTTTGGCAATGTGGATTCATCTGGGATAA |
| | SKARLHLQGRSNAW | AACACAATATTTTTAACCCTCCAATTATTGCTCGATACATCCGT |
| | RPQVNNPKEWLQVD | TTGCACCCAACTCATTATAGCATTCGCAGCACTCTTCGCATGG |
| | FQKTMKVTGVTTQG | AGTTGATGGGCTGTGATTTAAATAGTTGCAGCATGCCATTGGG |
| | VKSLLTSMYVKEFLIS | AATGGAGAGTAAAGCAATATCAGATGCACAGATTACTGCTTC |
| | SSQDGHQWTLFFQNG | ATCCTACTTTACCAATATGTTTGCCACCTGGTCTCCTTCAAAAG |
| | KVKVFQGNQDSFTPV | CTCGACTTCACCTCCAAGGGAGGAGTAATGCCTGGAGACCTCA |
| | VNSLDPPLLTRYLRIH | GGTGAATAATCCAAAAGAGTGGCTGCAAGTGGACTTCCAGAA |
| | PQSWVHQIALRMEVL | GACAATGAAAGTCACAGGAGTAACTACTCAGGGAGTAAAATC |
| | GCEAQDLYGAGSPG | TCTGCTTACCAGCATGTATGTGAAGGAGTTCCTCATCTCCAGC |
| | AETAEQKLISEEDLSP | AGTCAAGATGGCCATCAGTGGACTCTCTTTTTTCAGAATGGCA |
| | ATG | AAGTAAAGGTTTTTCAGGGAAATCAAGACTCCTTCACACCTGT |
| | | GGTGAACTCTCTAGACCCACCGTTACTGACTCGCTACCTTCGA |
| | | ATTCACCCCCAGAGTTGGGTGCACCAGATTGCCCTGAGGATGG |
| | | AGGTTCTGGGCTGCGAGGCACAGGACCTCTACGGCGCCGGAT |
| | | CACCTGGGGCCGAAACGGCCGAACAAAAACTCATCTCAGAAG |
| | | AGGATCTGTCACCTGCAACCGGTTGA |
| pBC0177 | MQIELSTCFFLCLLRF | ATGCAAATAGAGCTCTCCACCTGCTTCTTTCTGTGCCTTTTGCG |
| | CFSATRRYYLGAVEL | ATTCTGCTTTAGTGCCACCAGAAGATACTACCTGGGTGCAGTG |
| | SWDYMQSDLGELPV | GAACTGTCATGGGACTATATGCAAAGTGATCTCGGTGAGCTGC |
| | DARFPPRVPKSFPFNT | CTGTGGACGCAAGATTTCCTCCTAGAGTGCCAAAATCTTTTCC |
| | SVVYKKTLFVEFTDH | ATTCAACACCTCAGTCGTGTACAAAAAGACTCTGTTTGTAGAA |
| | LFNIAKPRPPWMGLL | TTCACGGATCACCTTTTCAACATCGCTAAGCCAAGGCCACCCT |
| | GPTIQAEVYDTVVITL | GGATGGGTCTGCTAGGTCCTACCATCCAGGCTGAGGTTTATGA |
| | KNMASHPVSLHAVG | TACAGTGGTCATTACACTTAAGAACATGGCTTCCCATCCTGTC |
| | VSYWKASEGAEYDD | AGTCTTCATGCTGTTGGTGTATCCTACTGGAAAGCTTCTGAGG |
| | QTSQREKEDDKVFPG | GAGCTGAATATGATGATCAGACCAGTCAAAGGGAGAAAGAAG |
| | GSHTYVWQVLKENG | ATGATAAAGTCTTCCCTGGTGGAAGCCATACATATGTCTGGCA |
| | PMASDPLCLTYSYLS | GGTCCTGAAAGAGAATGGTCCAATGGCCTCTGACCCACTGTGC |
| | HVDLVKDLNSGLIGA | CTTACCTACTCATATCTTTCTCATGTGGACCTGGTAAAAGACTT |
| | LLVCREGSLAKEKTQ | GAATTCAGGCCTCATTGGAGCCCTACTAGTATGTAGAGAAGGG |
| | TLHKFILLFAVFDEGK | AGTCTGGCCAAGGAAAAGACACAGACCTTGCACAAATTTATA |
| | SWHSETKNSLMQDR | CTACTTTTTGCTGTATTTGATGAAGGGAAAAGTTGGCACTCAG |
| | DAASARAWPKMHTV | AAACAAAGAACTCCTTGATGCAGGATAGGGATGCTGCATCTG |
| | NGYVNRSLPGLIGCH | CTCGGGCCTGGCCTAAAATGCACACAGTCAATGGTTATGTAAA |
| | RKSVYWHVIGMGTT | CAGGTCTCTGCCAGGTCTGATTGGATGCCACAGGAAATCAGTC |
| | PEVHSIFLEGHTFLVR | TATTGGCATGTGATTGGAATGGGCACCACTCCTGAAGTGCACT |
| | NHRQASLEISPITFLT | CAATATTCCTCGAAGGTCACACATTTCTTGTGAGGAACCATCG |
| | AQTLLMDLGQFLLFC | CCAGGCTAGCTTGGAAATCTCGCCAATAACTTTCCTTACTGCT |
| | HISSHQHDGMEAYVK | CAAACACTCTTGATGGACCTTGGACAGTTTCTACTGTTTTGTCA |
| | VDSCPEEPQLRMKNN | TATCTCTTCCCACCAACATGATGGCATGGAAGCTTATGTCAAA |
| | EEAEDYDDDLTDSEM | GTAGACAGCTGTCCAGAGGAACCCCAACTACGAATGAAAAAT |
| | DVVRFDDDNSPSFIQI | AATGAAGAAGCGGAAGACTATGATGATGATCTTACTGATTCTG |
| | RSVAKKHPKTWVHYI | AAATGGATGTGGTCAGGTTTGATGATGACAACTCTCCTTCCTT |
| | AAEEEDWDYAPLVL | TATCCAAATTCGCTCAGTTGCCAAGAAGCATCCTAAAACTTGG |
| | APDDRSYKSQYLNNG | GTACATTACATTGCTGCTGAAGAGGAGGACTGGGACTATGCTC |
| | PQRIGRKYKKVRFMA | CCTTAGTCCTCGCCCCCGATGACAGAAGTTATAAAAGTCAATA |
| | YTDETFKTREAIQHES | TTTGAACAATGGCCCTCAGCGGATTGGTAGGAAGTACAAAAA |
| | GILGPLLYGEVGDTL | AGTCCGATTTATGGCATACACAGATGAAACCTTTAAGACTCGT |
| | LIIFKNQASRPYNIYP | GAAGCTATTCAGCATGAATCAGGAATCTTGGGACCTTTACTTT |
| | HGITDVRPLYSRRLPK | ATGGGGAAGTTGGAGACACACTGTTGATTATATTTAAGAATCA |
| | GVKHLKDFPILPGEIF | AGCAAGCAGACCATATAACATCTACCCTCACGGAATCACTGAT |
| | KYKWTVTVEDGPTK | GTCCGTCCTTTGTATTCAAGGAGATTACCAAAAGGTGTAAAAC |
| | SDPRCLTRYYSSFVN | ATTTGAAGGATTTTCCAATTCTGCCAGGAGAAATATTCAAATA |
| | MERDLASGLIGPLLIC | TAAATGGACAGTGACTGTAGAAGATGGGCCAACTAAATCAGA |
| | YKESVDQRGNQIMSD | TCCTCGGTGCCTGACCCGCTATTACTCTAGTTTCGTTAATATGG |
| | KRNVILFSVFDENRS | AGAGAGATCTAGCTTCAGGACTCATTGGCCCTCTCCTCATCTG |
| | WYLTENIQRFLPNPA | CTACAAAGAATCTGTAGATCAAAGAGGAAACCAGATAATGTC |
| | GVQLEDPEFQASNIM | AGACAAGAGGAATGTCATCCTGTTTTCTGTATTTGATGAGAAC |
| | HSINGYVFDSLQLSV | CGAAGCTGGTACCTCACAGAGAATATACAACGCTTTCTCCCCA |
| | CLHEVAYWYILSIGA | ATCCAGCTGGAGTGCAGCTTGAGGATCCAGAGTTCCAAGCCTC |
| | QTDFLSVFFSGYTFK | CAACATCATGCACAGCATCAATGGCTATGTTTTTGATAGTTTG |
| | HKMVYEDTLTLFPFS | CAGTTGTCAGTTTGTTTGCATGAGGTGGCATACTGGTACATTCT |
| | GETVFMSMENPGLWI | AAGCATTGGAGCACAGACTGACTTCCTTTCTGTCTTCTTCTCTG |
| | LGCHNSDFRNRGMT | GATATACCTTCAAACACAAAATGGTCTATGAAGACACACTCAC |
| | ALLKVSSCDKNTGDY | CCTATTCCCATTCTCAGGAGAAACTGTCTTCATGTCGATGGAA |
| | YEDSYEDISAYLLSK | AACCCAGGTCTATGGATTCTGGGGTGCCACAACTCAGACTTTC |
| | NNAIEPRSFSQNPPVL | GGAACAGAGGCATGACCGCCTTACTGAAGGTTTCTAGTTGTGA |
| | KRHQREITRTTLQSD | CAAGAACACTGGTGATTATTACGAGGACAGTTATGAAGATATT |
| | QEEIDYDDTISVEMK | TCAGCATACTTGCTGAGTAAAAACAATGCCATTGAACCAAGA |
| | KEDFDIYDEDENQSP | AGCTTCTCTCAAAACCCACCAGTCTTGAAACGCCATCAACGGG |
| | RSFQKKTRHYFIAAV | AAATAACTCGTACTACTCTTCAGTCAGATCAAGAGGAAATCGA |
| | ERLWDYGMSSSPHVL | TTATGATGATACCATATCAGTTGAAATGAAGAAGGAAGATTTT |
| | RNRAQSGSVPQFKKV | GACATTTATGATGAGGATGAAAATCAGAGCCCCCGCAGCTTTC |
| | VFQEFTDGSFTQPLY | AAAAGAAAACACGACACTATTTTATTGCTGCAGTGGAGAGGC |
| | RGELNEHLGLLGPYI | TCTGGGATTATGGGATGAGTAGCTCCCCACATGTTCTAAGAAA |
| | RAEVEDNIMVTFRNQ | CAGGGCTCAGAGTGGCAGTGTCCCTCAGTTCAAGAAAGTTGTT |
| | ASRPYSFYSSLISYEE | TTCCAGGAATTTACTGATGGCTCCTTTACTCAGCCCTTATACCG |
| | DQRQGAEPRKNFVKP | TGGAGAACTAAATGAACATTTGGGACTCCTGGGGCCATATATA |
| | NETKTYFWKVQHHM | AGAGCAGAAGTTGAAGATAATATCATGGTAACTTTCAGAAAT |
| | APTKDEFDCKAWAY | CAGGCCTCTCGTCCCTATTCCTTCTATTCTAGCCTTATTTCTTAT |
| | FSDVDLEKDVHSGLI | GAGGAAGATCAGAGGCAAGGAGCAGAACCTAGAAAAAACTTT |
| | GPLLVCHTNTLNPAH | GTCAAGCCTAATGAAACCAAAACTTACTTTTGGAAAGTGCAAC |
| | GRQVTVQEFALFFTIF | ATCATATGGCACCCACTAAAGATGAGTTTGACTGCAAAGCCTG |
| | DETKSWYFTENMER | GGCTTATTTCTCTGATGTTGACCTGGAAAAAGATGTGCACTCA |
| | NCRAPCNGAPGSPAG | GGCCTGATTGGACCCCTTCTGGTCTGCCACACTAACACACTGA |
| | SPTSTEEGTSESATPE | ACCCTGCTCATGGGAGACAAGTGACAGTACAGGAATTTGCTCT |
| | SGPGSEPATSGSETPA | GTTTTTCACCATCTTTGATGAGACCAAAAGCTGGTACTTCACT |
| | SSIQMEDPTFKENYRF | GAAAATATGGAAAGAAACTGCAGGGCTCCCTGCAATGGCGCG |
| | HAINGYIMDTLPGLV | CCAGGTTCTCCTGCTGGCTCCCCCACCTCAACAGAAGAGGGGA |
| | MAQDQRIRWYLLSM | CAAGCGAAAGCGCTACGCCTGAGAGTGGCCCTGGCTCTGAGC |
| | GSNENIHSIHFSGHVF | CAGCCACCTCCGGCTCTGAAACCCCTGCCTCGAGCATCCAGAT |
| | TVRKKEEYKMALYN | GGAAGATCCCACTTTTAAAGAGAATTATCGCTTCCATGCAATC |
| | LYPGVFETVEMLPSK | AATGGCTACATAATGGATACACTACCTGGCTTAGTAATGGCTC |
| | AGIWRVECLIGEHLH | AGGATCAAAGGATTCGATGGTATCTGCTCAGCATGGGCAGCA |
| | AGMSTLFLVYSNKCQ | ATGAAAACATCCATTCTATTCATTTCAGTGGACATGTGTTCACT |
| | TPLGMASGHIRDFQIT | GTACGAAAAAAAGAGGAGTATAAAATGGCACTGTACAATCTC |
| | ASGQYGQWAPKLAR | TATCCAGGTGTTTTTGAGACAGTGGAAATGTTACCATCCAAAG |
| | LHYSGSINAWSTKEP | CTGGAATTTGGCGGGTGGAATGCCTTATTGGCGAGCATCTACA |
| | FSWIKVDLLAPMIIHG | TGCTGGGATGAGCACACTTTTTCTGGTGTACAGCAATAAGTGT |
| | IKTQGARQKFSSLYIS | CAGACTCCCCTGGGAATGGCTTCTGGACACATTAGAGATTTTC |
| | QFIIMYSLDGKKWQT | AGATTACAGCTTCAGGACAATATGGACAGTGGGCCCCAAAGC |
| | YRGNSTGTLMVFFGN | TGGCCAGACTTCATTATTCCGGATCAATCAATGCCTGGAGCAC |
| | VDSSGIKHNIFNPPIIA | CAAGGAGCCCTTTTCTTGGATCAAGGTGGATCTGTTGGCACCA |
| | RYIRLHPTHYSIRSTL | ATGATTATTCACGGCATCAAGACCCAGGGTGCCCGTCAGAAGT |
| | RMELMGCDLNSCSM | TCTCCAGCCTCTACATCTCTCAGTTTATCATCATGTATAGTCTT |
| | PLGMESKAISDAQITA | GATGGGAAGAAGTGGCAGACTTATCGAGGAAATTCCACTGGA |
| | SSYFTNMFATWSPSK | ACCTTAATGGTCTTCTTTGGCAATGTGGATTCATCTGGGATAA |
| | ARLHLQGRSNAWRP | AACACAATATTTTTAACCCTCCAATTATTGCTCGATACATCCGT |
| | QVNNPKEWLQVDFQ | TTGCACCCAACTCATTATAGCATTCGCAGCACTCTTCGCATGG |
| | KTMKVTGVTTQGVK | AGTTGATGGGCTGTGATTTAAATAGTTGCAGCATGCCATTGGG |
| | SLLTSMYVKEFLISSS | AATGGAGAGTAAAGCAATATCAGATGCACAGATTACTGCTTC |
| | QDGHQWTLFFQNGK | ATCCTACTTTACCAATATGTTTGCCACCTGGTCTCCTTCAAAAG |
| | VKVFQGNQDSFTPVV | CTCGACTTCACCTCCAAGGGAGGAGTAATGCCTGGAGACCTCA |
| | NSLDPPLLTRYLRIHP | GGTGAATAATCCAAAAGAGTGGCTGCAAGTGGACTTCCAGAA |
| | QSWVHQIALRMEVL | GACAATGAAAGTCACAGGAGTAACTACTCAGGGAGTAAAATC |
| | GCEAQDLYGAGSPG | TCTGCTTACCAGCATGTATGTGAAGGAGTTCCTCATCTCCAGC |
| | AETAEQKLISEEDLSP | AGTCAAGATGGCCATCAGTGGACTCTCTTTTTTCAGAATGGCA |
| | ATG | AAGTAAAGGTTTTTCAGGGAAATCAAGACTCCTTCACACCTGT |
| | | GGTGAACTCTCTAGACCCACCGTTACTGACTCGCTACCTTCGA |
| | | ATTCACCCCCAGAGTTGGGTGCACCAGATTGCCCTGAGGATGG |
| | | AGGTTCTGGGCTGCGAGGCACAGGACCTCTACGGCGCCGGAT |
| | | CACCTGGGGCCGAAACGGCCGAACAAAAACTCATCTCAGAAG |
| | | AGGATCTGTCACCTGCAACCGGTTGA |
| pBC0178 | MQIELSTCFFLCLLRF | ATGCAAATAGAGCTCTCCACCTGCTTCTTTCTGTGCCTTTTGCG |
| | CFSATRRYYLGAVEL | ATTCTGCTTTAGTGCCACCAGAAGATACTACCTGGGTGCAGTG |
| | SWDYMQSDLGELPV | GAACTGTCATGGGACTATATGCAAAGTGATCTCGGTGAGCTGC |
| | DARFPPRVPKSFPFNT | CTGTGGACGCAAGATTTCCTCCTAGAGTGCCAAAATCTTTTCC |
| | SVVYKKTLFVEFTDH | ATTCAACACCTCAGTCGTGTACAAAAAGACTCTGTTTGTAGAA |
| | LFNIAKPRPPWMGLL | TTCACGGATCACCTTTTCAACATCGCTAAGCCAAGGCCACCCT |
| | GPTIQAEVYDTVVITL | GGATGGGTCTGCTAGGTCCTACCATCCAGGCTGAGGTTTATGA |
| | KNMASHPVSLHAVG | TACAGTGGTCATTACACTTAAGAACATGGCTTCCCATCCTGTC |
| | VSYWKASEGAEYDD | AGTCTTCATGCTGTTGGTGTATCCTACTGGAAAGCTTCTGAGG |
| | QTSQREKEDDKVFPG | GAGCTGAATATGATGATCAGACCAGTCAAAGGGAGAAAGAAG |
| | GSHTYVWQVLKENG | ATGATAAAGTCTTCCCTGGTGGAAGCCATACATATGTCTGGCA |
| | PMASDPLCLTYSYLS | GGTCCTGAAAGAGAATGGTCCAATGGCCTCTGACCCACTGTGC |
| | HVDLVKDLNSGLIGA | CTTACCTACTCATATCTTTCTCATGTGGACCTGGTAAAAGACTT |
| | LLVCREGSLAKEKTQ | GAATTCAGGCCTCATTGGAGCCCTACTAGTATGTAGAGAAGGG |
| | TLHKFILLFAVFDEGK | AGTCTGGCCAAGGAAAAGACACAGACCTTGCACAAATTTATA |
| | SWHSETKNSLMQDR | CTACTTTTTGCTGTATTTGATGAAGGGAAAAGTTGGCACTCAG |
| | DAASARAWPKMHTV | AAACAAAGAACTCCTTGATGCAGGATAGGGATGCTGCATCTG |
| | NGYVNRSLPGLIGCH | CTCGGGCCTGGCCTAAAATGCACACAGTCAATGGTTATGTAAA |
| | RKSVYWHVIGMGTT | CAGGTCTCTGCCAGGTCTGATTGGATGCCACAGGAAATCAGTC |
| | PEVHSIFLEGHTFLVR | TATTGGCATGTGATTGGAATGGGCACCACTCCTGAAGTGCACT |
| | NHRQASLEISPITFLT | CAATATTCCTCGAAGGTCACACATTTCTTGTGAGGAACCATCG |
| | AQTLLMDLGQFLLFC | CCAGGCTAGCTTGGAAATCTCGCCAATAACTTTCCTTACTGCT |
| | HISSHQHDGMEAYVK | CAAACACTCTTGATGGACCTTGGACAGTTTCTACTGTTTTGTCA |
| | VDSCPEEPQLRMKNN | TATCTCTTCCCACCAACATGATGGCATGGAAGCTTATGTCAAA |
| | EEAEDYDDDLTDSEM | GTAGACAGCTGTCCAGAGGAACCCCAACTACGAATGAAAAAT |
| | DVVRFDDDNSPSFIQI | AATGAAGAAGCGGAAGACTATGATGATGATCTTACTGATTCTG |
| | RSVAKKHPKTWVHYI | AAATGGATGTGGTCAGGTTTGATGATGACAACTCTCCTTCCTT |
| | AAEEEDWDYAPLVL | TATCCAAATTCGCTCAGTTGCCAAGAAGCATCCTAAAACTTGG |
| | APDDRSYKSQYLNNG | GTACATTACATTGCTGCTGAAGAGGAGGACTGGGACTATGCTC |
| | PQRIGRKYKKVRFMA | CCTTAGTCCTCGCCCCCGATGACAGAAGTTATAAAAGTCAATA |
| | YTDETFKTREAIQHES | TTTGAACAATGGCCCTCAGCGGATTGGTAGGAAGTACAAAAA |
| | GILGPLLYGEVGDTL | AGTCCGATTTATGGCATACACAGATGAAACCTTTAAGACTCGT |
| | LIIFKNQASRPYNIYP | GAAGCTATTCAGCATGAATCAGGAATCTTGGGACCTTTACTTT |
| | HGITDVRPLYSRRLPK | ATGGGGAAGTTGGAGACACACTGTTGATTATATTTAAGAATCA |
| | GVKHLKDFPILPGEIF | AGCAAGCAGACCATATAACATCTACCCTCACGGAATCACTGAT |
| | KYKWTVTVEDGPTK | GTCCGTCCTTTGTATTCAAGGAGATTACCAAAAGGTGTAAAAC |
| | SDPRCLTRYYSSFVN | ATTTGAAGGATTTTCCAATTCTGCCAGGAGAAATATTCAAATA |
| | MERDLASGLIGPLLIC | TAAATGGACAGTGACTGTAGAAGATGGGCCAACTAAATCAGA |
| | YKESVDQRGNQIMSD | TCCTCGGTGCCTGACCCGCTATTACTCTAGTTTCGTTAATATGG |
| | KRNVILFSVFDENRS | AGAGAGATCTAGCTTCAGGACTCATTGGCCCTCTCCTCATCTG |
| | WYLTENIQRFLPNPA | CTACAAAGAATCTGTAGATCAAAGAGGAAACCAGATAATGTC |
| | GVQLEDPEFQASNIM | AGACAAGAGGAATGTCATCCTGTTTTCTGTATTTGATGAGAAC |
| | HSINGYVFDSLQLSV | CGAAGCTGGTACCTCACAGAGAATATACAACGCTTTCTCCCCA |
| | CLHEVAYWYILSIGA | ATCCAGCTGGAGTGCAGCTTGAGGATCCAGAGTTCCAAGCCTC |
| | QTDFLSVFFSGYTFK | CAACATCATGCACAGCATCAATGGCTATGTTTTTGATAGTTTG |
| | HKMVYEDTLTLFPFS | CAGTTGTCAGTTTGTTTGCATGAGGTGGCATACTGGTACATTCT |
| | GETVFMSMENPGLWI | AAGCATTGGAGCACAGACTGACTTCCTTTCTGTCTTCTTCTCTG |
| | LGCHNSDFRNRGMT | GATATACCTTCAAACACAAAATGGTCTATGAAGACACACTCAC |
| | ALLKVSSCDKNTGDY | CCTATTCCCATTCTCAGGAGAAACTGTCTTCATGTCGATGGAA |
| | YEDSYEDISAYLLSK | AACCCAGGTCTATGGATTCTGGGGTGCCACAACTCAGACTTTC |
| | NNAIEPRSFSQNPPVL | GGAACAGAGGCATGACCGCCTTACTGAAGGTTTCTAGTTGTGA |
| | KRHQREITRTTLQSD | CAAGAACACTGGTGATTATTACGAGGACAGTTATGAAGATATT |
| | QEEIDYDDTISVEMK | TCAGCATACTTGCTGAGTAAAAACAATGCCATTGAACCAAGA |
| | KEDFDIYDEDENQSP | AGCTTCTCTCAAAACCCACCAGTCTTGAAACGCCATCAACGGG |
| | RSFQKKTRHYFIAAV | AAATAACTCGTACTACTCTTCAGTCAGATCAAGAGGAAATCGA |
| | ERLWDYGMSSSPHVL | TTATGATGATACCATATCAGTTGAAATGAAGAAGGAAGATTTT |
| | RNRAQSGSVPQFKKV | GACATTTATGATGAGGATGAAAATCAGAGCCCCCGCAGCTTTC |
| | VFQEFTDGSFTQPLY | AAAAGAAAACACGACACTATTTTATTGCTGCAGTGGAGAGGC |
| | RGELNEHLGLLGPYI | TCTGGGATTATGGGATGAGTAGCTCCCCACATGTTCTAAGAAA |
| | RAEVEDNIMVTFRNQ | CAGGGCTCAGAGTGGCAGTGTCCCTCAGTTCAAGAAAGTTGTT |
| | ASRPYSFYSSLISYEE | TTCCAGGAATTTACTGATGGCTCCTTTACTCAGCCCTTATACCG |
| | DQRQGAEPRKNFVKP | TGGAGAACTAAATGAACATTTGGGACTCCTGGGGCCATATATA |
| | NETKTYFWKVQHHM | AGAGCAGAAGTTGAAGATAATATCATGGTAACTTTCAGAAAT |
| | APTKDEFDCKAWAY | CAGGCCTCTCGTCCCTATTCCTTCTATTCTAGCCTTATTTCTTAT |
| | FSDVDLEKDVHSGLI | GAGGAAGATCAGAGGCAAGGAGCAGAACCTAGAAAAAACTTT |
| | GPLLVCHTNTLNPAH | GTCAAGCCTAATGAAACCAAAACTTACTTTTGGAAAGTGCAAC |
| | GRQVTVQEFALFFTIF | ATCATATGGCACCCACTAAAGATGAGTTTGACTGCAAAGCCTG |
| | DETKSWYFTENMER | GGCTTATTTCTCTGATGTTGACCTGGAAAAAGATGTGCACTCA |
| | NCRAPCNIQMEDPTF | GGCCTGATTGGACCCCTTCTGGTCTGCCACACTAACACACTGA |
| | KENYRFHAINGYIMD | ACCCTGCTCATGGGAGACAAGTGACAGTACAGGAATTTGCTCT |
| | TLPGLVMAQDGAPGS | GTTTTTCACCATCTTTGATGAGACCAAAAGCTGGTACTTCACT |
| | PAGSPTSTEEGTSESA | GAAAATATGGAAAGAAACTGCAGGGCTCCCTGCAATATCCAG |
| | TPESGPGSEPATSGSE | ATGGAAGATCCCACTTTTAAAGAGAATTATCGCTTCCATGCAA |
| | TPASSQRIRWYLLSM | TCAATGGCTACATAATGGATACACTACCTGGCTTAGTAATGGC |
| | GSNENIHSIHFSGHVF | TCAGGATGGCGCGCCAGGTTCTCCTGCTGGCTCCCCCACCTCA |
| | TVRKKEEYKMALYN | ACAGAAGAGGGGACAAGCGAAAGCGCTACGCCTGAGAGTGGC |
| | LYPGVFETVEMLPSK | CCTGGCTCTGAGCCAGCCACCTCCGGCTCTGAAACCCCTGCCT |
| | AGIWRVECLIGEHLH | CGAGCCAAAGGATTCGATGGTATCTGCTCAGCATGGGCAGCA |
| | AGMSTLFLVYSNKCQ | ATGAAAACATCCATTCTATTCATTTCAGTGGACATGTGTTCACT |
| | TPLGMASGHIRDFQIT | GTACGAAAAAAAGAGGAGTATAAAATGGCACTGTACAATCTC |
| | ASGQYGQWAPKLAR | TATCCAGGTGTTTTTGAGACAGTGGAAATGTTACCATCCAAAG |
| | LHYSGSINAWSTKEP | CTGGAATTTGGCGGGTGGAATGCCTTATTGGCGAGCATCTACA |
| | FSWIKVDLLAPMIIHG | TGCTGGGATGAGCACACTTTTTCTGGTGTACAGCAATAAGTGT |
| | IKTQGARQKFSSLYIS | CAGACTCCCCTGGGAATGGCTTCTGGACACATTAGAGATTTTC |
| | QFIIMYSLDGKKWQT | AGATTACAGCTTCAGGACAATATGGACAGTGGGCCCCAAAGC |
| | YRGNSTGTLMVFFGN | TGGCCAGACTTCATTATTCCGGATCAATCAATGCCTGGAGCAC |
| | VDSSGIKHNIFNPPIIA | CAAGGAGCCCTTTTCTTGGATCAAGGTGGATCTGTTGGCACCA |
| | RYIRLHPTHYSIRSTL | ATGATTATTCACGGCATCAAGACCCAGGGTGCCCGTCAGAAGT |
| | RMELMGCDLNSCSM | TCTCCAGCCTCTACATCTCTCAGTTTATCATCATGTATAGTCTT |
| | PLGMESKAISDAQITA | GATGGGAAGAAGTGGCAGACTTATCGAGGAAATTCCACTGGA |
| | SSYFTNMFATWSPSK | ACCTTAATGGTCTTCTTTGGCAATGTGGATTCATCTGGGATAA |
| | ARLHLQGRSNAWRP | AACACAATATTTTTAACCCTCCAATTATTGCTCGATACATCCGT |
| | QVNNPKEWLQVDFQ | TTGCACCCAACTCATTATAGCATTCGCAGCACTCTTCGCATGG |
| | KTMKVTGVTTQGVK | AGTTGATGGGCTGTGATTTAAATAGTTGCAGCATGCCATTGGG |
| | SLLTSMYVKEFLISSS | AATGGAGAGTAAAGCAATATCAGATGCACAGATTACTGCTTC |
| | QDGHQWTLFFQNGK | ATCCTACTTTACCAATATGTTTGCCACCTGGTCTCCTTCAAAAG |
| | VKVFQGNQDSFTPVV | CTCGACTTCACCTCCAAGGGAGGAGTAATGCCTGGAGACCTCA |
| | NSLDPPLLTRYLRIHP | GGTGAATAATCCAAAAGAGTGGCTGCAAGTGGACTTCCAGAA |
| | QSWVHQIALRMEVL | GACAATGAAAGTCACAGGAGTAACTACTCAGGGAGTAAAATC |
| | GCEAQDLYGAGSPG | TCTGCTTACCAGCATGTATGTGAAGGAGTTCCTCATCTCCAGC |
| | AETAEQKLISEEDLSP | AGTCAAGATGGCCATCAGTGGACTCTCTTTTTTCAGAATGGCA |
| | ATG | AAGTAAAGGTTTTTCAGGGAAATCAAGACTCCTTCACACCTGT |
| | | GGTGAACTCTCTAGACCCACCGTTACTGACTCGCTACCTTCGA |
| | | ATTCACCCCCAGAGTTGGGTGCACCAGATTGCCCTGAGGATGG |
| | | AGGTTCTGGGCTGCGAGGCACAGGACCTCTACGGCGCCGGAT |
| | | CACCTGGGGCCGAAACGGCCGAACAAAAACTCATCTCAGAAG |
| | | AGGATCTGTCACCTGCAACCGGTTGA |
| pBC0141 | MQIELSTCFFLCLLRF | ATGCAAATAGAGCTCTCCACCTGCTTCTTTCTGTGCCTTTTGCG |
| | CFSATRRYYLGAVEL | ATTCTGCTTTAGTGCCACCAGAAGATACTACCTGGGTGCAGTG |
| | SWDYMQSDLGELPV | GAACTGTCATGGGACTATATGCAAAGTGATCTCGGTGAGCTGC |
| | DARFPPRVPKSFPFNT | CTGTGGACGCAAGATTTCCTCCTAGAGTGCCAAAATCTTTTCC |
| | SVVYKKTLFVEFTDH | ATTCAACACCTCAGTCGTGTACAAAAAGACTCTGTTTGTAGAA |
| | LFNIAKPRPPWMGLL | TTCACGGATCACCTTTTCAACATCGCTAAGCCAAGGCCACCCT |
| | GPTIQAEVYDTVVITL | GGATGGGTCTGCTAGGTCCTACCATCCAGGCTGAGGTTTATGA |
| | KNMASHPVSLHAVG | TACAGTGGTCATTACACTTAAGAACATGGCTTCCCATCCTGTC |
| | VSYWKASEGAEYDD | AGTCTTCATGCTGTTGGTGTATCCTACTGGAAAGCTTCTGAGG |
| | QTSQREKEDDKVFPG | GAGCTGAATATGATGATCAGACCAGTCAAAGGGAGAAAGAAG |
| | GSHTYVWQVLKENG | ATGATAAAGTCTTCCCTGGTGGAAGCCATACATATGTCTGGCA |
| | PMASDPLCLTYSYLS | GGTCCTGAAAGAGAATGGTCCAATGGCCTCTGACCCACTGTGC |
| | HVDLVKDLNSGLIGA | CTTACCTACTCATATCTTTCTCATGTGGACCTGGTAAAAGACTT |
| | LLVCREGSLAKEKTQ | GAATTCAGGCCTCATTGGAGCCCTACTAGTATGTAGAGAAGGG |
| | TLHKFILLFAVFDEGK | AGTCTGGCCAAGGAAAAGACACAGACCTTGCACAAATTTATA |
| | SWHSETKNSLMQDR | CTACTTTTTGCTGTATTTGATGAAGGGAAAAGTTGGCACTCAG |
| | DAASARAWPKMHTV | AAACAAAGAACTCCTTGATGCAGGATAGGGATGCTGCATCTG |
| | NGYVNRSLPGLIGCH | CTCGGGCCTGGCCTAAAATGCACACAGTCAATGGTTATGTAAA |
| | RKSVYWHVIGMGTT | CAGGTCTCTGCCAGGTCTGATTGGATGCCACAGGAAATCAGTC |
| | PEVHSIFLEGHTFLVR | TATTGGCATGTGATTGGAATGGGCACCACTCCTGAAGTGCACT |
| | NHRQASLEISPITFLT | CAATATTCCTCGAAGGTCACACATTTCTTGTGAGGAACCATCG |
| | AQTLLMDLGQFLLFC | CCAGGCTAGCTTGGAAATCTCGCCAATAACTTTCCTTACTGCT |
| | HISSHQHDGMEAYVK | CAAACACTCTTGATGGACCTTGGACAGTTTCTACTGTTTTGTCA |
| | VDSCPEEPQLRMKNN | TATCTCTTCCCACCAACATGATGGCATGGAAGCTTATGTCAAA |
| | EEAEDYDDDLTDSEM | GTAGACAGCTGTCCAGAGGAACCCCAACTACGAATGAAAAAT |
| | DVVRFDDDNSPSFIQI | AATGAAGAAGCGGAAGACTATGATGATGATCTTACTGATTCTG |
| | RSVAKKHPKTWVHYI | AAATGGATGTGGTCAGGTTTGATGATGACAACTCTCCTTCCTT |
| | AAEEEDWDYAPLVL | TATCCAAATTCGCTCAGTTGCCAAGAAGCATCCTAAAACTTGG |
| | APDDRSYKSQYLNNG | GTACATTACATTGCTGCTGAAGAGGAGGACTGGGACTATGCTC |
| | PQRIGRKYKKVRFMA | CCTTAGTCCTCGCCCCCGATGACAGAAGTTATAAAAGTCAATA |
| | YTDETFKTREAIQHES | TTTGAACAATGGCCCTCAGCGGATTGGTAGGAAGTACAAAAA |
| | GILGPLLYGEVGDTL | AGTCCGATTTATGGCATACACAGATGAAACCTTTAAGACTCGT |
| | LIIFKNQASRPYNIYP | GAAGCTATTCAGCATGAATCAGGAATCTTGGGACCTTTACTTT |
| | HGITDVRPLYSRRLPK | ATGGGGAAGTTGGAGACACACTGTTGATTATATTTAAGAATCA |
| | GVKHLKDFPILPGEIF | AGCAAGCAGACCATATAACATCTACCCTCACGGAATCACTGAT |
| | KYKWTVTVEDGPTK | GTCCGTCCTTTGTATTCAAGGAGATTACCAAAAGGTGTAAAAC |
| | SDPRCLTRYYSSFVN | ATTTGAAGGATTTTCCAATTCTGCCAGGAGAAATATTCAAATA |
| | MERDLASGLIGPLLIC | TAAATGGACAGTGACTGTAGAAGATGGGCCAACTAAATCAGA |
| | YKESVDQRGNQIMSD | TCCTCGGTGCCTGACCCGCTATTACTCTAGTTTCGTTAATATGG |
| | KRNVILFSVFDENRS | AGAGAGATCTAGCTTCAGGACTCATTGGCCCTCTCCTCATCTG |
| | WYLTENIQRFLPNPA | CTACAAAGAATCTGTAGATCAAAGAGGAAACCAGATAATGTC |
| | GVQLEDPEFQASNIM | AGACAAGAGGAATGTCATCCTGTTTTCTGTATTTGATGAGAAC |
| | HSINGYVFDSLQLSV | CGAAGCTGGTACCTCACAGAGAATATACAACGCTTTCTCCCCA |
| | CLHEVAYWYILSIGA | ATCCAGCTGGAGTGCAGCTTGAGGATCCAGAGTTCCAAGCCTC |
| | QTDFLSVFFSGYTFK | CAACATCATGCACAGCATCAATGGCTATGTTTTTGATAGTTTG |
| | HKMVYEDTLTLFPFS | CAGTTGTCAGTTTGTTTGCATGAGGTGGCATACTGGTACATTCT |
| | GETVFMSMENPGLWI | AAGCATTGGAGCACAGACTGACTTCCTTTCTGTCTTCTTCTCTG |
| | LGCHNSDFRNRGMT | GATATACCTTCAAACACAAAATGGTCTATGAAGACACACTCAC |
| | ALLKVSSCDKNTGDY | CCTATTCCCATTCTCAGGAGAAACTGTCTTCATGTCGATGGAA |
| | YEDSYEDISAYLLSK | AACCCAGGTCTATGGATTCTGGGGTGCCACAACTCAGACTTTC |
| | NNAIEPRSFSQNPPVL | GGAACAGAGGCATGACCGCCTTACTGAAGGTTTCTAGTTGTGA |
| | KRHQREITRTTLQSD | CAAGAACACTGGTGATTATTACGAGGACAGTTATGAAGATATT |
| | QEEIDYDDTISVEMK | TCAGCATACTTGCTGAGTAAAAACAATGCCATTGAACCAAGA |
| | KEDFDIYDEDENQSP | AGCTTCTCTCAAAACCCACCAGTCTTGAAACGCCATCAACGGG |
| | RSFQKKTRHYFIAAV | AAATAACTCGTACTACTCTTCAGTCAGATCAAGAGGAAATCGA |
| | ERLWDYGMSSSPHVL | TTATGATGATACCATATCAGTTGAAATGAAGAAGGAAGATTTT |
| | RNRAQSGSVPQFKKV | GACATTTATGATGAGGATGAAAATCAGAGCCCCCGCAGCTTTC |
| | VFQEFTDGSFTQPLY | AAAAGAAAACACGACACTATTTTATTGCTGCAGTGGAGAGGC |
| | RGELNEHLGLLGPYI | TCTGGGATTATGGGATGAGTAGCTCCCCACATGTTCTAAGAAA |
| | RAEVEDNIMVTFRNQ | CAGGGCTCAGAGTGGCAGTGTCCCTCAGTTCAAGAAAGTTGTT |
| | ASRPYSFYSSLISYEE | TTCCAGGAATTTACTGATGGCTCCTTTACTCAGCCCTTATACCG |
| | DQRQGAEPRKNFVKP | TGGAGAACTAAATGAACATTTGGGACTCCTGGGGCCATATATA |
| | NETKTYFWKVQHHM | AGAGCAGAAGTTGAAGATAATATCATGGTAACTTTCAGAAAT |
| | APTKDEFDCKAWAY | CAGGCCTCTCGTCCCTATTCCTTCTATTCTAGCCTTATTTCTTAT |
| | FSDVDLEKDVHSGLI | GAGGAAGATCAGAGGCAAGGAGCAGAACCTAGAAAAAACTTT |
| | GPLLVCHTNTLNPAH | GTCAAGCCTAATGAAACCAAAACTTACTTTTGGAAAGTGCAAC |
| | GRQVTVQEFALFFTIF | ATCATATGGCACCCACTAAAGATGAGTTTGACTGCAAAGCCTG |
| | DETKSWYFTENMER | GGCTTATTTCTCTGATGTTGACCTGGAAAAAGATGTGCACTCA |
| | NCRAPCNIQMEDPTF | GGCCTGATTGGACCCCTTCTGGTCTGCCACACTAACACACTGA |
| | KENYRFHAINGYIMD | ACCCTGCTCATGGGAGACAAGTGACAGTACAGGAATTTGCTCT |
| | TLPGLVMAQDQRIR | GTTTTTCACCATCTTTGATGAGACCAAAAGCTGGTACTTCACT |
| | WYLLSMGSNENIHSI | GAAAATATGGAAAGAAACTGCAGGGCTCCCTGCAATATCCAG |
| | HFSGHVFTVRKKEEY | ATGGAAGATCCCACTTTTAAAGAGAATTATCGCTTCCATGCAA |
| | KMALYNLYPGVFET | TCAATGGCTACATAATGGATACACTACCTGGCTTAGTAATGGC |
| | VEMLPSKAGIWRVEC | TCAGGATCAAAGGATTCGATGGTATCTGCTCAGCATGGGCAGC |
| | LIGEHLHAGMSTLFL | AATGAAAACATCCATTCTATTCATTTCAGTGGACATGTGTTCA |
| | VYSNGAPGSPAGSPT | CTGTACGAAAAAAAGAGGAGTATAAAATGGCACTGTACAATC |
| | STEEGTSESATPESGP | TCTATCCAGGTGTTTTTGAGACAGTGGAAATGTTACCATCCAA |
| | GSEPATSGSETPASSK | AGCTGGAATTTGGCGGGTGGAATGCCTTATTGGCGAGCATCTA |
| | CQTPLGMASGHIRDF | CATGCTGGGATGAGCACACTTTTTCTGGTGTACAGCAATGGCG |
| | QITASGQYGQWAPKL | CGCCAGGTTCTCCTGCTGGCTCCCCCACCTCAACAGAAGAGGG |
| | ARLHYSGSINAWSTK | GACAAGCGAAAGCGCTACGCCTGAGAGTGGCCCTGGCTCTGA |
| | EPFSWIKVDLLAPMII | GCCAGCCACCTCCGGCTCTGAAACCCCTGCCTCGAGCAAGTGT |
| | HGIKTQGARQKFSSL | CAGACTCCCCTGGGAATGGCTTCTGGACACATTAGAGATTTTC |
| | YISQFIIMYSLDGKKW | AGATTACAGCTTCAGGACAATATGGACAGTGGGCCCCAAAGC |
| | QTYRGNSTGTLMVFF | TGGCCAGACTTCATTATTCCGGATCAATCAATGCCTGGAGCAC |
| | GNVDSSGIKHNIFNPP | CAAGGAGCCCTTTTCTTGGATCAAGGTGGATCTGTTGGCACCA |
| | IIARYIRLHPTHYSIRS | ATGATTATTCACGGCATCAAGACCCAGGGTGCCCGTCAGAAGT |
| | TLRMELMGCDLNSCS | TCTCCAGCCTCTACATCTCTCAGTTTATCATCATGTATAGTCTT |
| | MPLGMESKAISDAQI | GATGGGAAGAAGTGGCAGACTTATCGAGGAAATTCCACTGGA |
| | TASSYFTNMFATWSP | ACCTTAATGGTCTTCTTTGGCAATGTGGATTCATCTGGGATAA |
| | SKARLHLQGRSNAW | AACACAATATTTTTAACCCTCCAATTATTGCTCGATACATCCGT |
| | RPQVNNPKEWLQVD | TTGCACCCAACTCATTATAGCATTCGCAGCACTCTTCGCATGG |
| | FQKTMKVTGVTTQG | AGTTGATGGGCTGTGATTTAAATAGTTGCAGCATGCCATTGGG |
| | VKSLLTSMYVKEFLIS | AATGGAGAGTAAAGCAATATCAGATGCACAGATTACTGCTTC |
| | SSQDGHQWTLFFQNG | ATCCTACTTTACCAATATGTTTGCCACCTGGTCTCCTTCAAAAG |
| | KVKVFQGNQDSFTPV | CTCGACTTCACCTCCAAGGGAGGAGTAATGCCTGGAGACCTCA |
| | VNSLDPPLLTRYLRIH | GGTGAATAATCCAAAAGAGTGGCTGCAAGTGGACTTCCAGAA |
| | PQSWVHQIALRMEVL | GACAATGAAAGTCACAGGAGTAACTACTCAGGGAGTAAAATC |
| | GCEAQDLYGAGSPG | TCTGCTTACCAGCATGTATGTGAAGGAGTTCCTCATCTCCAGC |
| | AETAEQKLISEEDLSP | AGTCAAGATGGCCATCAGTGGACTCTCTTTTTTCAGAATGGCA |
| | ATG | AAGTAAAGGTTTTTCAGGGAAATCAAGACTCCTTCACACCTGT |
| | | GGTGAACTCTCTAGACCCACCGTTACTGACTCGCTACCTTCGA |
| | | ATTCACCCCCAGAGTTGGGTGCACCAGATTGCCCTGAGGATGG |
| | | AGGTTCTGGGCTGCGAGGCACAGGACCTCTACGGCGCCGGAT |
| | | CACCTGGGGCCGAAACGGCCGAACAAAAACTCATCTCAGAAG |
| | | AGGATCTGTCACCTGCAACCGGTTGA |
| pBC0179 | MQIELSTCFFLCLLRF | ATGCAAATAGAGCTCTCCACCTGCTTCTTTCTGTGCCTTTTGCG |
| | CFSATRRYYLGAVEL | ATTCTGCTTTAGTGCCACCAGAAGATACTACCTGGGTGCAGTG |
| | SWDYMQSDLGELPV | GAACTGTCATGGGACTATATGCAAAGTGATCTCGGTGAGCTGC |
| | DARFPPRVPKSFPFNT | CTGTGGACGCAAGATTTCCTCCTAGAGTGCCAAAATCTTTTCC |
| | SVVYKKTLFVEFTDH | ATTCAACACCTCAGTCGTGTACAAAAAGACTCTGTTTGTAGAA |
| | LFNIAKPRPPWMGLL | TTCACGGATCACCTTTTCAACATCGCTAAGCCAAGGCCACCCT |
| | GPTIQAEVYDTVVITL | GGATGGGTCTGCTAGGTCCTACCATCCAGGCTGAGGTTTATGA |
| | KNMASHPVSLHAVG | TACAGTGGTCATTACACTTAAGAACATGGCTTCCCATCCTGTC |
| | VSYWKASEGAEYDD | AGTCTTCATGCTGTTGGTGTATCCTACTGGAAAGCTTCTGAGG |
| | QTSQREKEDDKVFPG | GAGCTGAATATGATGATCAGACCAGTCAAAGGGAGAAAGAAG |
| | GSHTYVWQVLKENG | ATGATAAAGTCTTCCCTGGTGGAAGCCATACATATGTCTGGCA |
| | PMASDPLCLTYSYLS | GGTCCTGAAAGAGAATGGTCCAATGGCCTCTGACCCACTGTGC |
| | HVDLVKDLNSGLIGA | CTTACCTACTCATATCTTTCTCATGTGGACCTGGTAAAAGACTT |
| | LLVCREGSLAKEKTQ | GAATTCAGGCCTCATTGGAGCCCTACTAGTATGTAGAGAAGGG |
| | TLHKFILLFAVFDEGK | AGTCTGGCCAAGGAAAAGACACAGACCTTGCACAAATTTATA |
| | SWHSETKNSLMQDR | CTACTTTTTGCTGTATTTGATGAAGGGAAAAGTTGGCACTCAG |
| | DAASARAWPKMHTV | AAACAAAGAACTCCTTGATGCAGGATAGGGATGCTGCATCTG |
| | NGYVNRSLPGLIGCH | CTCGGGCCTGGCCTAAAATGCACACAGTCAATGGTTATGTAAA |
| | RKSVYWHVIGMGTT | CAGGTCTCTGCCAGGTCTGATTGGATGCCACAGGAAATCAGTC |
| | PEVHSIFLEGHTFLVR | TATTGGCATGTGATTGGAATGGGCACCACTCCTGAAGTGCACT |
| | NHRQASLEISPITFLT | CAATATTCCTCGAAGGTCACACATTTCTTGTGAGGAACCATCG |
| | AQTLLMDLGQFLLFC | CCAGGCTAGCTTGGAAATCTCGCCAATAACTTTCCTTACTGCT |
| | HISSHQHDGMEAYVK | CAAACACTCTTGATGGACCTTGGACAGTTTCTACTGTTTTGTCA |
| | VDSCPEEPQLRMKNN | TATCTCTTCCCACCAACATGATGGCATGGAAGCTTATGTCAAA |
| | EEAEDYDDDLTDSEM | GTAGACAGCTGTCCAGAGGAACCCCAACTACGAATGAAAAAT |
| | DVVRFDDDNSPSFIQI | AATGAAGAAGCGGAAGACTATGATGATGATCTTACTGATTCTG |
| | RSVAKKHPKTWVHYI | AAATGGATGTGGTCAGGTTTGATGATGACAACTCTCCTTCCTT |
| | AAEEEDWDYAPLVL | TATCCAAATTCGCTCAGTTGCCAAGAAGCATCCTAAAACTTGG |
| | APDDRSYKSQYLNNG | GTACATTACATTGCTGCTGAAGAGGAGGACTGGGACTATGCTC |
| | PQRIGRKYKKVRFMA | CCTTAGTCCTCGCCCCCGATGACAGAAGTTATAAAAGTCAATA |
| | YTDETFKTREAIQHES | TTTGAACAATGGCCCTCAGCGGATTGGTAGGAAGTACAAAAA |
| | GILGPLLYGEVGDTL | AGTCCGATTTATGGCATACACAGATGAAACCTTTAAGACTCGT |
| | LIIFKNQASRPYNIYP | GAAGCTATTCAGCATGAATCAGGAATCTTGGGACCTTTACTTT |
| | HGITDVRPLYSRRLPK | ATGGGGAAGTTGGAGACACACTGTTGATTATATTTAAGAATCA |
| | GVKHLKDFPILPGEIF | AGCAAGCAGACCATATAACATCTACCCTCACGGAATCACTGAT |
| | KYKWTVTVEDGPTK | GTCCGTCCTTTGTATTCAAGGAGATTACCAAAAGGTGTAAAAC |
| | SDPRCLTRYYSSFVN | ATTTGAAGGATTTTCCAATTCTGCCAGGAGAAATATTCAAATA |
| | MERDLASGLIGPLLIC | TAAATGGACAGTGACTGTAGAAGATGGGCCAACTAAATCAGA |
| | YKESVDQRGNQIMSD | TCCTCGGTGCCTGACCCGCTATTACTCTAGTTTCGTTAATATGG |
| | KRNVILFSVFDENRS | AGAGAGATCTAGCTTCAGGACTCATTGGCCCTCTCCTCATCTG |
| | WYLTENIQRFLPNPA | CTACAAAGAATCTGTAGATCAAAGAGGAAACCAGATAATGTC |
| | GVQLEDPEFQASNIM | AGACAAGAGGAATGTCATCCTGTTTTCTGTATTTGATGAGAAC |
| | HSINGYVFDSLQLSV | CGAAGCTGGTACCTCACAGAGAATATACAACGCTTTCTCCCCA |
| | CLHEVAYWYILSIGA | ATCCAGCTGGAGTGCAGCTTGAGGATCCAGAGTTCCAAGCCTC |
| | QTDFLSVFFSGYTFK | CAACATCATGCACAGCATCAATGGCTATGTTTTTGATAGTTTG |
| | HKMVYEDTLTLFPFS | CAGTTGTCAGTTTGTTTGCATGAGGTGGCATACTGGTACATTCT |
| | GETVFMSMENPGLWI | AAGCATTGGAGCACAGACTGACTTCCTTTCTGTCTTCTTCTCTG |
| | LGCHNSDFRNRGMT | GATATACCTTCAAACACAAAATGGTCTATGAAGACACACTCAC |
| | ALLKVSSCDKNTGDY | CCTATTCCCATTCTCAGGAGAAACTGTCTTCATGTCGATGGAA |
| | YEDSYEDISAYLLSK | AACCCAGGTCTATGGATTCTGGGGTGCCACAACTCAGACTTTC |
| | NNAIEPRSFSQNPPVL | GGAACAGAGGCATGACCGCCTTACTGAAGGTTTCTAGTTGTGA |
| | KRHQREITRTTLQSD | CAAGAACACTGGTGATTATTACGAGGACAGTTATGAAGATATT |
| | QEEIDYDDTISVEMK | TCAGCATACTTGCTGAGTAAAAACAATGCCATTGAACCAAGA |
| | KEDFDIYDEDENQSP | AGCTTCTCTCAAAACCCACCAGTCTTGAAACGCCATCAACGGG |
| | RSFQKKTRHYFIAAV | AAATAACTCGTACTACTCTTCAGTCAGATCAAGAGGAAATCGA |
| | ERLWDYGMSSSPHVL | TTATGATGATACCATATCAGTTGAAATGAAGAAGGAAGATTTT |
| | RNRAQSGSVPQFKKV | GACATTTATGATGAGGATGAAAATCAGAGCCCCCGCAGCTTTC |
| | VFQEFTDGSFTQPLY | AAAAGAAAACACGACACTATTTTATTGCTGCAGTGGAGAGGC |
| | RGELNEHLGLLGPYI | TCTGGGATTATGGGATGAGTAGCTCCCCACATGTTCTAAGAAA |
| | RAEVEDNIMVTFRNQ | CAGGGCTCAGAGTGGCAGTGTCCCTCAGTTCAAGAAAGTTGTT |
| | ASRPYSFYSSLISYEE | TTCCAGGAATTTACTGATGGCTCCTTTACTCAGCCCTTATACCG |
| | DQRQGAEPRKNFVKP | TGGAGAACTAAATGAACATTTGGGACTCCTGGGGCCATATATA |
| | NETKTYFWKVQHHM | AGAGCAGAAGTTGAAGATAATATCATGGTAACTTTCAGAAAT |
| | APTKDEFDCKAWAY | CAGGCCTCTCGTCCCTATTCCTTCTATTCTAGCCTTATTTCTTAT |
| | FSDVDLEKDVHSGLI | GAGGAAGATCAGAGGCAAGGAGCAGAACCTAGAAAAAACTTT |
| | GPLLVCHTNTLNPAH | GTCAAGCCTAATGAAACCAAAACTTACTTTTGGAAAGTGCAAC |
| | GRQVTVQEFALFFTIF | ATCATATGGCACCCACTAAAGATGAGTTTGACTGCAAAGCCTG |
| | DETKSWYFTENMER | GGCTTATTTCTCTGATGTTGACCTGGAAAAAGATGTGCACTCA |
| | NCRAPCNIQMEDPTF | GGCCTGATTGGACCCCTTCTGGTCTGCCACACTAACACACTGA |
| | KENYRFHAINGYIMD | ACCCTGCTCATGGGAGACAAGTGACAGTACAGGAATTTGCTCT |
| | TLPGLVMAQDQRIR | GTTTTTCACCATCTTTGATGAGACCAAAAGCTGGTACTTCACT |
| | WYLLSMGSNENIHSI | GAAAATATGGAAAGAAACTGCAGGGCTCCCTGCAATATCCAG |
| | HFSGHVFTVRKKEEY | ATGGAAGATCCCACTTTTAAAGAGAATTATCGCTTCCATGCAA |
| | KMALYNLYPGVFET | TCAATGGCTACATAATGGATACACTACCTGGCTTAGTAATGGC |
| | VEMLPSKAGIWRVEC | TCAGGATCAAAGGATTCGATGGTATCTGCTCAGCATGGGCAGC |
| | LIGEHLHAGMSTLFL | AATGAAAACATCCATTCTATTCATTTCAGTGGACATGTGTTCA |
| | VYSNKCQTPLGMAS | CTGTACGAAAAAAAGAGGAGTATAAAATGGCACTGTACAATC |
| | GHIRDFQITASGQYG | TCTATCCAGGTGTTTTTGAGACAGTGGAAATGTTACCATCCAA |
| | QWAPKLARLHYSGSI | AGCTGGAATTTGGCGGGTGGAATGCCTTATTGGCGAGCATCTA |
| | NAWSTKEPFGAPGSP | CATGCTGGGATGAGCACACTTTTTCTGGTGTACAGCAATAAGT |
| | AGSPTSTEEGTSESAT | GTCAGACTCCCCTGGGAATGGCTTCTGGACACATTAGAGATTT |
| | PESGPGSEPATSGSET | TCAGATTACAGCTTCAGGACAATATGGACAGTGGGCCCCAAA |
| | PASSSWIKVDLLAPMI | GCTGGCCAGACTTCATTATTCCGGATCAATCAATGCCTGGAGC |
| | IHGIKTQGARQKFSSL | ACCAAGGAGCCCTTTGGCGCGCCAGGTTCTCCTGCTGGCTCCC |
| | YISQFIIMYSLDGKKW | CCACCTCAACAGAAGAGGGGACAAGCGAAAGCGCTACGCCTG |
| | QTYRGNSTGTLMVFF | AGAGTGGCCCTGGCTCTGAGCCAGCCACCTCCGGCTCTGAAAC |
| | GNVDSSGIKHNIFNPP | CCCTGCCTCGAGCTCTTGGATCAAGGTGGATCTGTTGGCACCA |
| | IIARYIRLHPTHYSIRS | ATGATTATTCACGGCATCAAGACCCAGGGTGCCCGTCAGAAGT |
| | TLRMELMGCDLNSCS | TCTCCAGCCTCTACATCTCTCAGTTTATCATCATGTATAGTCTT |
| | MPLGMESKAISDAQI | GATGGGAAGAAGTGGCAGACTTATCGAGGAAATTCCACTGGA |
| | TASSYFTNMFATWSP | ACCTTAATGGTCTTCTTTGGCAATGTGGATTCATCTGGGATAA |
| | SKARLHLQGRSNAW | AACACAATATTTTTAACCCTCCAATTATTGCTCGATACATCCGT |
| | RPQVNNPKEWLQVD | TTGCACCCAACTCATTATAGCATTCGCAGCACTCTTCGCATGG |
| | FQKTMKVTGVTTQG | AGTTGATGGGCTGTGATTTAAATAGTTGCAGCATGCCATTGGG |
| | VKSLLTSMYVKEFLIS | AATGGAGAGTAAAGCAATATCAGATGCACAGATTACTGCTTC |
| | SSQDGHQWTLFFQNG | ATCCTACTTTACCAATATGTTTGCCACCTGGTCTCCTTCAAAAG |
| | KVKVFQGNQDSFTPV | CTCGACTTCACCTCCAAGGGAGGAGTAATGCCTGGAGACCTCA |
| | VNSLDPPLLTRYLRIH | GGTGAATAATCCAAAAGAGTGGCTGCAAGTGGACTTCCAGAA |
| | PQSWVHQIALRMEVL | GACAATGAAAGTCACAGGAGTAACTACTCAGGGAGTAAAATC |
| | GCEAQDLYGAGSPG | TCTGCTTACCAGCATGTATGTGAAGGAGTTCCTCATCTCCAGC |
| | AETAEQKLISEEDLSP | AGTCAAGATGGCCATCAGTGGACTCTCTTTTTTCAGAATGGCA |
| | ATG | AAGTAAAGGTTTTTCAGGGAAATCAAGACTCCTTCACACCTGT |
| | | GGTGAACTCTCTAGACCCACCGTTACTGACTCGCTACCTTCGA |
| | | ATTCACCCCCAGAGTTGGGTGCACCAGATTGCCCTGAGGATGG |
| | | AGGTTCTGGGCTGCGAGGCACAGGACCTCTACGGCGCCGGAT |
| | | CACCTGGGGCCGAAACGGCCGAACAAAAACTCATCTCAGAAG |
| | | AGGATCTGTCACCTGCAACCGGTTGA |
| pBC205 | | ATGCAAATAGAGCTCTCCACCTGCTTCTTTCTGTGCCTTTTGCG |
| | | ATTCTGCTTTAGTGCCACCAGAAGATACTACCTGGGTGCAGTG |
| | | GAACTGTCATGGGACTATATGCAAAGTGATCTCGGTGAGCTGC |
| | | CTGTGGACGCAAGATTTCCTCCTAGAGTGCCAAAATCTTTTCC |
| | | ATTCAACACCTCAGTCGTGTACAAAAAGACTCTGTTTGTAGAA |
| | | TTCACGGTTCACCTTTTCAACATCGCTAAGCCAAGGCCACCCT |
| | | GGATGGGTCTGCTAGGTCCTACCATCCAGGCTGAGGTTTATGA |
| | | TACAGTGGTCATTACACTTAAGAACATGGCTTCCCATCCTGTC |
| | | AGCCTTCATGCTGTTGGTGTATCCTACTGGAAAGCGTCTGAGG |
| | | GAGCTGAATATGATGATCAGACCAGTCAAAGGGAGAAAGAAG |
| | | ATGATAAAGTTTTCCCTGGTGGAAGCCATACATATGTCTGGCA |
| | | GGTCCTGAAAGAGAATGGTCCAATGGCCTCTGACCCACTGTGC |
| | | CTTACCTACTCATATCTTTCTCATGTGGACCTGGTAAAAGACTT |
| | | GAATTCAGGCCTCATTGGAGCCCTACTAGTATGTAGAGAAGGG |
| | | AGTCTGGCCAAGGAAAAGACACAGACCTTGCACAAATTTATA |
| | | CTACTTTTTGCTGTATTTGATGAAGGGAAAAGTTGGCACTCAG |
| | | AAACAAAGAACTCCTTGATGCAGGATAGGGATGCTGCATCTG |
| | | CTCGGGCCTGGCCTAAAATGCACACAGTCAATGGTTATGTAAA |
| | | CAGTTCTCTGCCAGGTCTGATTGGATGCCACAGGAAATCAGTC |
| | | TATTGGCATGTGATTGGAATGGGCACCACTCCTGAAGTGCACT |
| | | CAATATTCCTCGAAGGTCACACATTTCTTGTGAGGAACCATCG |
| | | CCAGGCGTCCTTGGAAATCTCGCCAATAACTTTCCTTACTGCTC |
| | | AAACACTCTTGATGGACCTTGGACAGTTTCTACTGTTTTGTCAT |
| | | ATCTCTTCCCACCAACATGATGGCATGGAAGCCTATGTCAAAG |
| | | TAGACAGCTGTCCAGAGGAACCCCAACTACGAATGAAAAATA |
| | | ATGAAGAAGCGGAAGATTATGATGATGATCTTACTGATTCTGA |
| | | AATGGATGTGGTCAGGTTTGATGATGACAACTCTCCTTCCTTT |
| | | ATCCAAATTCGCTCAGTTGCCAAGAAGCATCCTAAAACTTGGG |
| | | TACATTACATTGCTGCTGAAGAGGAGGACTGGGACTATGCTCC |
| | | CTTAGTCCTCGCCCCCGATGACAGAAGTTATAAAAGTCAATAT |
| | | TTGAACAATGGCCCTCAGCGGATTGGTAGGAAGTACAAAAAA |
| | | GTCCGATTTATGGCATACACAGATGAAACCTTTAAGACTCGTG |
| | | AAGCTATTCAGCATGAATCAGGAATCTTGGGACCTTTACTTTA |
| | | TGGGGAAGTTGGAGACACACTGTTGATTATATTTAAGAATCAA |
| | | GCAAGCAGACCATATAACATCTACCCTCACGGAATCACTGATG |
| | | TCCGTCCTTTGTATTCAAGGAGATTACCAAAAGGTGTAAAACA |
| | | TTTGAAGGATTTTCCAATTCTGCCAGGAGAAATATTCAAATAT |
| | | AAATGGACAGTGACTGTAGAAGATGGGCCAACTAAATCAGAT |
| | | CCTCGGTGCCTGACCCGCTATTACTCTAGTTTCGTTAATATGGA |
| | | GAGAGATCTAGCTTCAGGACTCATTGGCCCTCTCCTCATCTGC |
| | | TACAAAGAATCTGTAGATCAAAGAGGAAACCAGATAATGTCA |
| | | GACAAGAGGAATGTCATCCTGTTTTCTGTATTTGATGAGAACC |
| | | GAAGCTGGTACCTCACAGAGAATATACAACGCTTTCTCCCCAA |
| | | TCCAGCTGGAGTGCAGCTTGAGGATCCAGAGTTCCAAGCCTCC |
| | | AACATCATGCACAGCATCAATGGCTATGTTTTTGATAGTTTGC |
| | | AGTTGTCAGTTTGTTTGCATGAGGTGGCATACTGGTACATTCT |
| | | AAGCATTGGAGCACAGACTGACTTCCTTTCTGTGTTCTTCTCTG |
| | | GATATACCTTCAAACACAAAATGGTCTATGAAGATACACTCAC |
| | | CCTATTCCCATTCTCAGGAGAAACTGTGTTCATGTCGATGGAA |
| | | AACCCAGGTCTATGGATTCTGGGGTGCCACAACTCAGACTTTC |
| | | GGAACAGAGGCATGACCGCCTTACTGAAGGTTTCTAGTTGTGA |
| | | CAAGAACACTGGTGATTATTACGAGGACAGTTATGAAGATATT |
| | | TCAGCATACTTGCTGAGTAAAAACAATGCCATTGAACCAAGA |
| | | AGCTTCTCCCAGAATGGGTCTCCCGCGCCAGGGTCTCCCCCAC |
| | | CAGTCTTGAAACGCCATCAACGGGAAATAACTCGTACTACTCT |
| | | TCAGTCAGATCAAGAGGAAATTGACTATGATGATACCATATCA |
| | | GTTGAAATGAAGAAGGAAGATTTTGACATTTATGATGAGGAT |
| | | GAAAATCAGAGCCCCCGCAGCTTTCAAAAGAAAACACGACAC |
| | | TATTTTATTGCTGCAGTGGAGAGGCTCTGGGATTATGGGATGA |
| | | GTAGCTCCCCACATGTTCTAAGAAACAGGGCTCAGAGTGGCA |
| | | GTGTCCCTCAGTTCAAGAAAGTTGTTTTCCAGGAATTTACTGA |
| | | TGGCTCCTTTACTCAGCCCTTATACCGTGGAGAACTAAATGAA |
| | | CATTTGGGACTCCTGGGGCCATATATAAGAGCAGAAGTTGAA |
| | | GATAATATCATGGTAACTTTCAGAAATCAGGCCTCTCGTCCCT |
| | | ATTCCTTCTATTCTAGCCTTATTTCTTATGAGGAAGATCAGAGG |
| | | CAAGGAGCAGAACCTAGAAAAAACTTTGTCAAGCCTAATGAA |
| | | ACCAAAACTTACTTTTGGAAAGTGCAACATCATATGGCACCCA |
| | | CTAAAGATGAGTTTGACTGCAAAGCCTGGGCTTATTTCTCTGA |
| | | TGTTGACCTGGAAAAAGATGTGCACTCAGGCCTGATTGGACCC |
| | | CTTCTGGTCTGCCACACTAACACACTGAACCCTGCTCATGGGA |
| | | GACAAGTGACAGTACAGGAATTTGCTCTGTTTTTCACCATCTTT |
| | | GATGAAACCAAAAGCTGGTACTTCACTGAAAATATGGAAAGA |
| | | AACTGCAGGGCTCCCTGCAATATCCAGATGGAAGATCCCACTT |
| | | TTAAAGAGAATTATCGCTTCCATGCAATCAATGGCTACATAAT |
| | | GGATACACTACCTGGCTTAGTAATGGCTCAGGATCAAAGGATT |
| | | CGATGGTATCTGCTCAGCATGGGCAGCAATGAAAACATCCATT |
| | | CTATTCATTTCAGTGGACATGTGTTCACTGTACGAAAAAAAGA |
| | | GGAGTATAAAATGGCACTGTACAATCTCTATCCAGGTGTTTTT |
| | | GAGACAGTGGAAATGTTACCATCCAAAGCTGGAATTTGGCGG |
| | | GTGGAATGCCTTATTGGCGAGCATCTACATGCTGGGATGAGCA |
| | | CACTTTTTCTGGTGTACAGCAATAAGTGTCAGACTCCCCTGGG |
| | | AATGGCTTCTGGACACATTAGAGATTTTCAGATTACAGCTTCA |
| | | GGACAATATGGACAGTGGGCCCCAAAGCTGGCCAGACTTCAT |
| | | TATTCCGGATCAATCAATGCCTGGAGCACCAAGGAGCCCTTTT |
| | | CTTGGATCAAGGTGGATCTGTTGGCACCAATGATTATTCACGG |
| | | CATCAAGACCCAGGGTGCCCGTCAGAAGTTCTCCAGCCTCTAC |
| | | ATCTCTCAGTTTATCATCATGTATAGTCTTGATGGGAAGAAGT |
| | | GGCAGACTTATCGAGGAAATTCCACTGGAACCTTAATGGTTTT |
| | | CTTTGGCAATGTGGATTCATCTGGGATAAAACACAATATTTTT |
| | | AACCCTCCAATTATTGCTCGATACATCCGTTTGCACCCAACTC |
| | | ATTATAGCATTCGCAGCACTCTTCGCATGGAGTTGATGGGCTG |
| | | TGATTTAAATAGTTGCAGCATGCCATTGGGAATGGAGAGTAAA |
| | | GCAATATCAGATGCACAGATTACTGCTTCATCCTACTTTACCA |
| | | ATATGTTTGCCACCTGGACTCCTTCAAAAGCTCGACTTCACCTC |
| | | CAAGGGAGGAGTAATGCCTGGCGACCTCAGGTGAATAATCCA |
| | | AAAGAGTGGCTGCAAGTGGACTTCCAGAAAACAATGAAAGTC |
| | | ACAGGAGTAACTACTCAGGGAGTAAAATCTCTGCTTACCAGCA |
| | | TGTATGTGAAGGAGTTCCTCATCTCCAGCAGTCAAGATGGCCA |
| | | TCAGTGGACTCTCTTTTTTCAGAATGGCAAAGTAAAGGTTTTTC |
| | | AGGGAAATCAAGACTCCTTCACACCTGTGGTGAACTCTCTAGA |
| | | CCCACCGTTACTGACTCGCTACCTTCGAATTCACCCCCAGAGT |
| | | TGGGTGCACCAGATTGCCCTGAGGATGGAGGTTCTGGGCTGCG |
| | | AGGCACAGGACCTCTACTGA |
| pBC0206 | MQIELSTCFFLCLLRF | ATGCAAATAGAGCTCTCCACCTGCTTCTTTCTGTGCCTTTTGCG |
| pBC0207 | CFSATRRYYLGAVEL | ATTCTGCTTTAGTGCCACCAGAAGATACTACCTGGGTGCAGTG |
| | SWDYMQSDLGELPV | GAACTGTCATGGGACTATATGCAAAGTGATCTCGGTGAGCTGC |
| | DARFPPRVPKSFPFNT | CTGTGGACGCAAGATTTCCTCCTAGAGTGCCAAAATCTTTTCC |
| | SVVYKKTLFVEFTVH | ATTCAACACCTCAGTCGTGTACAAAAAGACTCTGTTTGTAGAA |
| | LFNIAKPRPPWMGLL | TTCACGGTTCACCTTTTCAACATCGCTAAGCCAAGGCCACCCT |
| | GPTIQAEVYDTVVITL | GGATGGGTCTGCTAGGTCCTACCATCCAGGCTGAGGTTTATGA |
| | KNMASHPVSLHAVG | TACAGTGGTCATTACACTTAAGAACATGGCTTCCCATCCTGTC |
| | VSYWKASEGAEYDD | AGCCTTCATGCTGTTGGTGTATCCTACTGGAAAGCGTCTGAGG |
| | QTSQREKEDDKVFPG | GAGCTGAATATGATGATCAGACCAGTCAAAGGGAGAAAGAAG |
| | GSHTYVWQVLKENG | ATGATAAAGTTTTCCCTGGTGGAAGCCATACATATGTCTGGCA |
| | PMASDPLCLTYSYLS | GGTCCTGAAAGAGAATGGTCCAATGGCCTCTGACCCACTGTGC |
| | HVDLVKDLNSGLIGA | CTTACCTACTCATATCTTTCTCATGTGGACCTGGTAAAAGACTT |
| | LLVCREGSLAKEKTQ | GAATTCAGGCCTCATTGGAGCCCTACTAGTATGTAGAGAAGGG |
| | TLHKFILLFAVFDEGK | AGTCTGGCCAAGGAAAAGACACAGACCTTGCACAAATTTATA |
| | SWHSETKNSLMQDR | CTACTTTTTGCTGTATTTGATGAAGGGAAAAGTTGGCACTCAG |
| | DAASARAWPKMHTV | AAACAAAGAACTCCTTGATGCAGGATAGGGATGCTGCATCTG |
| | NGYVNSSLPGLIGCH | CTCGGGCCTGGCCTAAAATGCACACAGTCAATGGTTATGTAAA |
| | RKSVYWHVIGMGTT | CAGTTCTCTGCCAGGTCTGATTGGATGCCACAGGAAATCAGTC |
| | PEVHSIFLEGHTFLVR | TATTGGCATGTGATTGGAATGGGCACCACTCCTGAAGTGCACT |
| | NHRQASLEISPITFLT | CAATATTCCTCGAAGGTCACACATTTCTTGTGAGGAACCATCG |
| | AQTLLMDLGQFLLFC | CCAGGCGTCCTTGGAAATCTCGCCAATAACTTTCCTTACTGCTC |
| | HISSHQHDGMEAYVK | AAACACTCTTGATGGACCTTGGACAGTTTCTACTGTTTTGTCAT |
| | VDSCPEEPQLRMKNN | ATCTCTTCCCACCAACATGATGGCATGGAAGCCTATGTCAAAG |
| | EEAEDYDDDLTDSEM | TAGACAGCTGTCCAGAGGAACCCCAACTACGAATGAAAAATA |
| | DVVRFDDDNSPSFIQI | ATGAAGAAGCGGAAGATTATGATGATGATCTTACTGATTCTGA |
| | RSVAKKHPKTWVHYI | AATGGATGTGGTCAGGTTTGATGATGACAACTCTCCTTCCTTT |
| | AAEEEDWDYAPLVL | ATCCAAATTCGCTCAGTTGCCAAGAAGCATCCTAAAACTTGGG |
| | APDDRSYKSQYLNNG | TACATTACATTGCTGCTGAAGAGGAGGACTGGGACTATGCTCC |
| | PQRIGRKYKKVRFMA | CTTAGTCCTCGCCCCCGATGACAGAAGTTATAAAAGTCAATAT |
| | YTDETFKTREAIQHES | TTGAACAATGGCCCTCAGCGGATTGGTAGGAAGTACAAAAAA |
| | GILGPLLYGEVGDTL | GTCCGATTTATGGCATACACAGATGAAACCTTTAAGACTCGTG |
| | LIIFKNQASRPYNIYP | AAGCTATTCAGCATGAATCAGGAATCTTGGGACCTTTACTTTA |
| | HGITDVRPLYSRRLPK | TGGGGAAGTTGGAGACACACTGTTGATTATATTTAAGAATCAA |
| | GVKHLKDFPILPGEIF | GCAAGCAGACCATATAACATCTACCCTCACGGAATCACTGATG |
| | KYKWTVTVEDGPTK | TCCGTCCTTTGTATTCAAGGAGATTACCAAAAGGTGTAAAACA |
| | SDPRCLTRYYSSFVN | TTTGAAGGATTTTCCAATTCTGCCAGGAGAAATATTCAAATAT |
| | MERDLASGLIGPLLIC | AAATGGACAGTGACTGTAGAAGATGGGCCAACTAAATCAGAT |
| | YKESVDQRGNQIMSD | CCTCGGTGCCTGACCCGCTATTACTCTAGTTTCGTTAATATGGA |
| | KRNVILFSVFDENRS | GAGAGATCTAGCTTCAGGACTCATTGGCCCTCTCCTCATCTGC |
| | WYLTENIQRFLPNPA | TACAAAGAATCTGTAGATCAAAGAGGAAACCAGATAATGTCA |
| | GVQLEDPEFQASNIM | GACAAGAGGAATGTCATCCTGTTTTCTGTATTTGATGAGAACC |
| | HSINGYVFDSLQLSV | GAAGCTGGTACCTCACAGAGAATATACAACGCTTTCTCCCCAA |
| | CLHEVAYWYILSIGA | TCCAGCTGGAGTGCAGCTTGAGGATCCAGAGTTCCAAGCCTCC |
| | QTDFLSVFFSGYTFK | AACATCATGCACAGCATCAATGGCTATGTTTTTGATAGTTTGC |
| | HKMVYEDTLTLFPFS | AGTTGTCAGTTTGTTTGCATGAGGTGGCATACTGGTACATTCT |
| | GETVFMSMENPGLWI | AAGCATTGGAGCACAGACTGACTTCCTTTCTGTGTTCTTCTCTG |
| | LGCHNSDFRNRGMT | GATATACCTTCAAACACAAAATGGTCTATGAAGATACACTCAC |
| | ALLKVSSCDKNTGDY | CCTATTCCCATTCTCAGGAGAAACTGTGTTCATGTCGATGGAA |
| | YEDSYEDISAYLLSK | AACCCAGGTCTATGGATTCTGGGGTGCCACAACTCAGACTTTC |
| | NNAIEPRSFSQNGLGT | GGAACAGAGGCATGACCGCCTTACTGAAGGTTTCTAGTTGTGA |
| | SESATPESGPGSEPAT | CAAGAACACTGGTGATTATTACGAGGACAGTTATGAAGATATT |
| | SGSETPGTSESATPES | TCAGCATACTTGCTGAGTAAAAACAATGCCATTGAACCAAGA |
| | GPGSEPATSGSETPGT | AGCTTCTCCCAGAATGGTCTCGGTACCTCAGAGTCTGCTACCC |
| | SESATPESGPGTSTEP | CCGAGTCAGGGCCAGGATCAGAGCCAGCCACCTCCGGGTCTG |
| | SEGSAPGSPAGSPTST | AGACACCCGGGACTTCCGAGAGTGCCACCCCTGAGTCCGGAC |
| | EEGTSESATPESGPGS | CCGGGTCCGAGCCCGCCACTTCCGGCTCCGAAACTCCCGGCAC |
| | EPATSGSETPGTSESA | AAGCGAGAGCGCTACCCCAGAGTCAGGACCAGGAACATCTAC |
| | TPESGPGSPAGSPTST | AGAGCCCTCTGAAGGCTCCGCTCCAGGGTCCCCAGCCGGCAGT |
| | EEGSPAGSPTSTEEGT | CCCACTAGCACCGAGGAGGGAACCTCTGAAAGCGCCACACCC |
| | STEPSEGSAPGTSESA | GAATCAGGGCCAGGGTCTGAGCCTGCTACCAGCGGCAGCGAG |
| | TPESGPGTSESATPES | ACACCAGGCACCTCTGAGTCCGCCACACCAGAGTCCGGACCC |
| | GPGTSESATPESGPGS | GGATCTCCCGCTGGGAGCCCCACCTCCACTGAGGAGGGATCTC |
| | EPATSGSETPGSEPAT | CTGCTGGCTCTCCAACATCTACTGAGGAAGGTACCTCAACCGA |
| | SGSETPGSPAGSPTST | GCCATCCGAGGGATCAGCTCCCGGCACCTCAGAGTCGGCAAC |
| | EEGTSTEPSEGSAPGT | CCCGGAGTCTGGACCCGGAACTTCCGAAAGTGCCACACCAGA |
| | STEPSEGSAPGSEPAT | GTCCGGTCCCGGGACTTCAGAATCAGCAACACCCGAGTCCGGC |
| | SGSETPGTSESATPES | CCTGGGTCTGAACCCGCCACAAGTGGTAGTGAGACACCAGGA |
| | GPGTSTEPSEGSAPGL | TCAGAACCTGCTACCTCAGGGTCAGAGACACCCGGATCTCCGG |
| | PPVLKRHQREITRTTL | CAGGCTCACCAACCTCCACTGAGGAGGGCACCAGCACAGAAC |
| | QSDQEEIDYDDTISVE | CAAGCGAGGGCTCCGCACCCGGAACAAGCACTGAACCCAGTG |
| | MKKEDFDIYDEDENQ | AGGGTTCAGCACCCGGCTCTGAGCCGGCCACAAGTGGCAGTG |
| | SPRSFQKKTRHYFIAA | AGACACCCGGCACTTCAGAGAGTGCCACCCCCGAGAGTGGCC |
| | VERLWDYGMSSSPH | CAGGCACTAGTACCGAGCCCTCTGAAGGCAGTGCGCCAGGTCT |
| | VLRNRAQSGSVPQFK | CCCACCAGTCTTGAAACGCCATCAACGGGAAATAACTCGTACT |
| | KVVFQEFTDGSFTQP | ACTCTTCAGTCAGATCAAGAGGAAATTGACTATGATGATACCA |
| | LYRGELNEHLGLLGP | TATCAGTTGAAATGAAGAAGGAAGATTTTGACATTTATGATGA |
| | YIRAEVEDNIMVTFR | GGATGAAAATCAGAGCCCCCGCAGCTTTCAAAAGAAAACACG |
| | NQASRPYSFYSSLISY | ACACTATTTTATTGCTGCAGTGGAGAGGCTCTGGGATTATGGG |
| | EEDQRQGAEPRKNFV | ATGAGTAGCTCCCCACATGTTCTAAGAAACAGGGCTCAGAGTG |
| | KPNETKTYFWKVQH | GCAGTGTCCCTCAGTTCAAGAAAGTTGTTTTCCAGGAATTTAC |
| | HMAPTKDEFDCKAW | TGATGGCTCCTTTACTCAGCCCTTATACCGTGGAGAACTAAAT |
| | AYFSDVDLEKDVHSG | GAACATTTGGGACTCCTGGGGCCATATATAAGAGCAGAAGTT |
| | LIGPLLVCHTNTLNPA | GAAGATAATATCATGGTAACTTTCAGAAATCAGGCCTCTCGTC |
| | HGRQVTVQEFALFFTI | CCTATTCCTTCTATTCTAGCCTTATTTCTTATGAGGAAGATCAG |
| | FDETKSWYFTENMER | AGGCAAGGAGCAGAACCTAGAAAAAACTTTGTCAAGCCTAAT |
| | NCRAPCNIQMEDPTF | GAAACCAAAACTTACTTTTGGAAAGTGCAACATCATATGGCAC |
| | KENYRFHAINGYIMD | CCACTAAAGATGAGTTTGACTGCAAAGCCTGGGCTTATTTCTC |
| | TLPGLVMAQDQRIR | TGATGTTGACCTGGAAAAAGATGTGCACTCAGGCCTGATTGGA |
| | WYLLSMGSNENIHSI | CCCCTTCTGGTCTGCCACACTAACACACTGAACCCTGCTCATG |
| | HFSGHVFTVRKKEEY | GGAGACAAGTGACAGTACAGGAATTTGCTCTGTTTTTCACCAT |
| | KMALYNLYPGVFET | CTTTGATGAAACCAAAAGCTGGTACTTCACTGAAAATATGGAA |
| | VEMLPSKAGIWRVEC | AGAAACTGCAGGGCTCCCTGCAATATCCAGATGGAAGATCCC |
| | LIGEHLHAGMSTLFL | ACTTTTAAAGAGAATTATCGCTTCCATGCAATCAATGGCTACA |
| | VYSNKCQTPLGMAS | TAATGGATACACTACCTGGCTTAGTAATGGCTCAGGATCAAAG |
| | GHIRDFQITASGQYG | GATTCGATGGTATCTGCTCAGCATGGGCAGCAATGAAAACATC |
| | QWAPKLARLHYSGSI | CATTCTATTCATTTCAGTGGACATGTGTTCACTGTACGAAAAA |
| | NAWSTKEPFSWIKVD | AAGAGGAGTATAAAATGGCACTGTACAATCTCTATCCAGGTGT |
| | LLAPMIIHGIKTQGAR | TTTTGAGACAGTGGAAATGTTACCATCCAAAGCTGGAATTTGG |
| | QKFSSLYISQFIIMYSL | CGGGTGGAATGCCTTATTGGCGAGCATCTACATGCTGGGATGA |
| | DGKKWQTYRGNSTG | GCACACTTTTTCTGGTGTACAGCAATAAGTGTCAGACTCCCCT |
| | TLMVFFGNVDSSGIK | GGGAATGGCTTCTGGACACATTAGAGATTTTCAGATTACAGCT |
| | HNIFNPPIIARYIRLHP | TCAGGACAATATGGACAGTGGGCCCCAAAGCTGGCCAGACTT |
| | THYSIRSTLRMELMG | CATTATTCCGGATCAATCAATGCCTGGAGCACCAAGGAGCCCT |
| | CDLNSCSMPLGMESK | TTTCTTGGATCAAGGTGGATCTGTTGGCACCAATGATTATTCA |
| | AISDAQITASSYFTNM | CGGCATCAAGACCCAGGGTGCCCGTCAGAAGTTCTCCAGCCTC |
| | FATWTPSKARLHLQG | TACATCTCTCAGTTTATCATCATGTATAGTCTTGATGGGAAGA |
| | RSNAWRPQVNNPKE | AGTGGCAGACTTATCGAGGAAATTCCACTGGAACCTTAATGGT |
| | WLQVDFQKTMKVTG | TTTCTTTGGCAATGTGGATTCATCTGGGATAAAACACAATATT |
| | VTTQGVKSLLTSMYV | TTTAACCCTCCAATTATTGCTCGATACATCCGTTTGCACCCAAC |
| | KEFLISSSQDGHQWT | TCATTATAGCATTCGCAGCACTCTTCGCATGGAGTTGATGGGC |
| | LFFQNGKVKVFQGN | TGTGATTTAAATAGTTGCAGCATGCCATTGGGAATGGAGAGTA |
| | QDSFTPVVNSLDPPLL | AAGCAATATCAGATGCACAGATTACTGCTTCATCCTACTTTAC |
| | TRYLRIHPQSWVHQI | CAATATGTTTGCCACCTGGACTCCTTCAAAAGCTCGACTTCAC |
| | ALRMEVLGCEAQDLY | CTCCAAGGGAGGAGTAATGCCTGGCGACCTCAGGTGAATAAT |
| | | CCAAAAGAGTGGCTGCAAGTGGACTTCCAGAAAACAATGAAA |
| | | GTCACAGGAGTAACTACTCAGGGAGTAAAATCTCTGCTTACCA |
| | | GCATGTATGTGAAGGAGTTCCTCATCTCCAGCAGTCAAGATGG |
| | | CCATCAGTGGACTCTCTTTTTTCAGAATGGCAAAGTAAAGGTT |
| | | TTTCAGGGAAATCAAGACTCCTTCACACCTGTGGTGAACTCTC |
| | | TAGACCCACCGTTACTGACTCGCTACCTTCGAATTCACCCCCA |
| | | GAGTTGGGTGCACCAGATTGCCCTGAGGATGGAGGTTCTGGGC |
| | | TGCGAGGCACAGGACCTCTACTGA |
| pBC0208 | MQIELSTCFFLCLLRF | ATGCAAATAGAGCTCTCCACCTGCTTCTTTCTGTGCCTTTTGCG |
| | CFSATRRYYLGAVEL | ATTCTGCTTTAGTGCCACCAGAAGATACTACCTGGGTGCAGTG |
| | SWDYMQSDLGELPV | GAACTGTCATGGGACTATATGCAAAGTGATCTCGGTGAGCTGC |
| | DARFPPRVPKSFPFNT | CTGTGGACGCAAGATTTCCTCCTAGAGTGCCAAAATCTTTTCC |
| | SVVYKKTLFVEFTDH | ATTCAACACCTCAGTCGTGTACAAAAAGACTCTGTTTGTAGAA |
| | LFNIAKPRPPWMGLL | TTCACGGATCACCTTTTCAACATCGCTAAGCCAAGGCCACCCT |
| | GPTIQAEVYDTVVITL | GGATGGGTCTGCTAGGTCCTACCATCCAGGCTGAGGTTTATGA |
| | KNMASHPVSLHAVG | TACAGTGGTCATTACACTTAAGAACATGGCTTCCCATCCTGTC |
| | VSYWKASEGAEYDD | AGTCTTCATGCTGTTGGTGTATCCTACTGGAAAGCTTCTGAGG |
| | QTSQREKEDDKVFPG | GAGCTGAATATGATGATCAGACCAGTCAAAGGGAGAAAGAAG |
| | GSHTYVWQVLKENG | ATGATAAAGTCTTCCCTGGTGGAAGCCATACATATGTCTGGCA |
| | PMASDPLCLTYSYLS | GGTCCTGAAAGAGAATGGTCCAATGGCCTCTGACCCACTGTGC |
| | HVDLVKDLNSGLIGA | CTTACCTACTCATATCTTTCTCATGTGGACCTGGTAAAAGACTT |
| | LLVCREGSLAKEKTQ | GAATTCAGGCCTCATTGGAGCCCTACTAGTATGTAGAGAAGGG |
| | TLHKFILLFAVFDEGK | AGTCTGGCCAAGGAAAAGACACAGACCTTGCACAAATTTATA |
| | SWHSETKNSLMQDR | CTACTTTTTGCTGTATTTGATGAAGGGAAAAGTTGGCACTCAG |
| | DAASARAWPKMHTV | AAACAAAGAACTCCTTGATGCAGGATAGGGATGCTGCATCTG |
| | NGYVNRSLPGLIGCH | CTCGGGCCTGGCCTAAAATGCACACAGTCAATGGTTATGTAAA |
| | RKSVYWHVIGMGTT | CAGGTCTCTGCCAGGTCTGATTGGATGCCACAGGAAATCAGTC |
| | PEVHSIFLEGHTFLVR | TATTGGCATGTGATTGGAATGGGCACCACTCCTGAAGTGCACT |
| | NHRQASLEISPITFLT | CAATATTCCTCGAAGGTCACACATTTCTTGTGAGGAACCATCG |
| | AQTLLMDLGQFLLFC | CCAGGCTAGCTTGGAAATCTCGCCAATAACTTTCCTTACTGCT |
| | HISSHQHDGMEAYVK | CAAACACTCTTGATGGACCTTGGACAGTTTCTACTGTTTTGTCA |
| | VDSCPEEPQLRMKNN | TATCTCTTCCCACCAACATGATGGCATGGAAGCTTATGTCAAA |
| | EEAEDYDDDLTDSEM | GTAGACAGCTGTCCAGAGGAACCCCAACTACGAATGAAAAAT |
| | DVVRFDDDNSPSFIQI | AATGAAGAAGCGGAAGACTATGATGATGATCTTACTGATTCTG |
| | RSVAKKHPKTWVHYI | AAATGGATGTGGTCAGGTTTGATGATGACAACTCTCCTTCCTT |
| | AAEEEDWDYAPLVL | TATCCAAATTCGCTCAGTTGCCAAGAAGCATCCTAAAACTTGG |
| | APDDRSYKSQYLNNG | GTACATTACATTGCTGCTGAAGAGGAGGACTGGGACTATGCTC |
| | PQRIGRKYKKVRFMA | CCTTAGTCCTCGCCCCCGATGACAGAAGTTATAAAAGTCAATA |
| | YTDETFKTREAIQHES | TTTGAACAATGGCCCTCAGCGGATTGGTAGGAAGTACAAAAA |
| | GILGPLLYGEVGDTL | AGTCCGATTTATGGCATACACAGATGAAACCTTTAAGACTCGT |
| | LIIFKNQASRPYNIYP | GAAGCTATTCAGCATGAATCAGGAATCTTGGGACCTTTACTTT |
| | HGITDVRPLYSRRLPK | ATGGGGAAGTTGGAGACACACTGTTGATTATATTTAAGAATCA |
| | GVKHLKDFPILPGEIF | AGCAAGCAGACCATATAACATCTACCCTCACGGAATCACTGAT |
| | KYKWTVTVEDGPTK | GTCCGTCCTTTGTATTCAAGGAGATTACCAAAAGGTGTAAAAC |
| | SDPRCLTRYYSSFVN | ATTTGAAGGATTTTCCAATTCTGCCAGGAGAAATATTCAAATA |
| | MERDLASGLIGPLLIC | TAAATGGACAGTGACTGTAGAAGATGGGCCAACTAAATCAGA |
| | YKESVDQRGNQIMSD | TCCTCGGTGCCTGACCCGCTATTACTCTAGTTTCGTTAATATGG |
| | KRNVILFSVFDENRS | AGAGAGATCTAGCTTCAGGACTCATTGGCCCTCTCCTCATCTG |
| | WYLTENIQRFLPNPA | CTACAAAGAATCTGTAGATCAAAGAGGAAACCAGATAATGTC |
| | GVQLEDPEFQASNIM | AGACAAGAGGAATGTCATCCTGTTTTCTGTATTTGATGAGAAC |
| | HSINGYVFDSLQLSV | CGAAGCTGGTACCTCACAGAGAATATACAACGCTTTCTCCCCA |
| | CLHEVAYWYILSIGA | ATCCAGCTGGAGTGCAGCTTGAGGATCCAGAGTTCCAAGCCTC |
| | QTDFLSVFFSGYTFK | CAACATCATGCACAGCATCAATGGCTATGTTTTTGATAGTTTG |
| | HKMVYEDTLTLFPFS | CAGTTGTCAGTTTGTTTGCATGAGGTGGCATACTGGTACATTCT |
| | GETVFMSMENPGLWI | AAGCATTGGAGCACAGACTGACTTCCTTTCTGTCTTCTTCTCTG |
| | LGCHNSDFRNRGMT | GATATACCTTCAAACACAAAATGGTCTATGAAGACACACTCAC |
| | ALLKVSSCDKNTGDY | CCTATTCCCATTCTCAGGAGAAACTGTCTTCATGTCGATGGAA |
| | YEDSYEDISAYLLSK | AACCCAGGTCTATGGATTCTGGGGTGCCACAACTCAGACTTTC |
| | NNAIEPRSFSQNPPVL | GGAACAGAGGCATGACCGCCTTACTGAAGGTTTCTAGTTGTGA |
| | KRHQREITRTTLQSD | CAAGAACACTGGTGATTATTACGAGGACAGTTATGAAGATATT |
| | QEEIDYDDTISVEMK | TCAGCATACTTGCTGAGTAAAAACAATGCCATTGAACCAAGA |
| | KEDFDIYDEDENQSP | AGCTTCTCTCAAAACCCACCAGTCTTGAAACGCCATCAACGGG |
| | RSFQKKTRHYFIAAV | AAATAACTCGTACTACTCTTCAGTCAGATCAAGAGGAAATCGA |
| | ERLWDYGMSSSPHVL | TTATGATGATACCATATCAGTTGAAATGAAGAAGGAAGATTTT |
| | RNRAQSGSVPQFKKV | GACATTTATGATGAGGATGAAAATCAGAGCCCCCGCAGCTTTC |
| | VFQEFTDGSFTQPLY | AAAAGAAAACACGACACTATTTTATTGCTGCAGTGGAGAGGC |
| | RGELNEHLGLLGPYI | TCTGGGATTATGGGATGAGTAGCTCCCCACATGTTCTAAGAAA |
| | RAEVEDNIMVTFRNQ | CAGGGCTCAGAGTGGCAGTGTCCCTCAGTTCAAGAAAGTTGTT |
| | ASRPYSFYSSLISYEE | TTCCAGGAATTTACTGATGGCTCCTTTACTCAGCCCTTATACCG |
| | DQRQGAEPRKNFVKP | TGGAGAACTAAATGAACATTTGGGACTCCTGGGGCCATATATA |
| | NETKTYFWKVQHHM | AGAGCAGAAGTTGAAGATAATATCATGGTAACTTTCAGAAAT |
| | APTKDEFDCKAWAY | CAGGCCTCTCGTCCCTATTCCTTCTATTCTAGCCTTATTTCTTAT |
| | FSDVDLEKDVHSGLI | GAGGAAGATCAGAGGCAAGGAGCAGAACCTAGAAAAAACTTT |
| | GPLLVCHTNTLNPAH | GTCAAGCCTAATGAAACCAAAACTTACTTTTGGAAAGTGCAAC |
| | GRQVTVQEFALFFTIF | ATCATATGGCACCCACTAAAGATGAGTTTGACTGCAAAGCCTG |
| | DETKSWYFTENMER | GGCTTATTTCTCTGATGTTGACCTGGAAAAAGATGTGCACTCA |
| | NCRAPCNIQMEDPTF | GGCCTGATTGGACCCCTTCTGGTCTGCCACACTAACACACTGA |
| | KENYRFHAINGYIMD | ACCCTGCTCATGGGAGACAAGTGACAGTACAGGAATTTGCTCT |
| | TLPGLVMAQDQRIR | GTTTTTCACCATCTTTGATGAGACCAAAAGCTGGTACTTCACT |
| | WYLLSMGSNENIHSI | GAAAATATGGAAAGAAACTGCAGGGCTCCCTGCAATATCCAG |
| | HFSGHVFTVRKKEEY | ATGGAAGATCCCACTTTTAAAGAGAATTATCGCTTCCATGCAA |
| | KMALYNLYPGVFET | TCAATGGCTACATAATGGATACACTACCTGGCTTAGTAATGGC |
| | VEMLPSKAGIWRVEC | TCAGGATCAAAGGATTCGATGGTATCTGCTCAGCATGGGCAGC |
| | LIGEHLHAGMSTLFL | AATGAAAACATCCATTCTATTCATTTCAGTGGACATGTGTTCA |
| | VYSNKCQTPLGMAS | CTGTACGAAAAAAAGAGGAGTATAAAATGGCACTGTACAATC |
| | GHIRDFQITASGQYG | TCTATCCAGGTGTTTTTGAGACAGTGGAAATGTTACCATCCAA |
| | QWAPKLARLHYSGSI | AGCTGGAATTTGGCGGGTGGAATGCCTTATTGGCGAGCATCTA |
| | NAWSTKEPFSWIKVD | CATGCTGGGATGAGCACACTTTTTCTGGTGTACAGCAATAAGT |
| | LLAPMIIHGIKTQGAR | GTCAGACTCCCCTGGGAATGGCTTCTGGACACATTAGAGATTT |
| | QKGAPGSPAGSPTST | TCAGATTACAGCTTCAGGACAATATGGACAGTGGGCCCCAAA |
| | EEGTSESATPESGPGS | GCTGGCCAGACTTCATTATTCCGGATCAATCAATGCCTGGAGC |
| | EPATSGSETPASSFSS | ACCAAGGAGCCCTTTTCTTGGATCAAGGTGGATCTGTTGGCAC |
| | LYISQFIIMYSLDGKK | CAATGATTATTCACGGCATCAAGACCCAGGGTGCCCGTCAGAA |
| | WQTYRGNSTGTLMV | GGGCGCGCCAGGTTCTCCTGCTGGCTCCCCCACCTCAACAGAA |
| | FFGNVDSSGIKHNIFN | GAGGGGACAAGCGAAAGCGCTACGCCTGAGAGTGGCCCTGGC |
| | PPIIARYIRLHPTHYSI | TCTGAGCCAGCCACCTCCGGCTCTGAAACCCCTGCCTCGAGCT |
| | RSTLRMELMGCDLNS | TCTCCAGCCTCTACATCTCTCAGTTTATCATCATGTATAGTCTT |
| | CSMPLGMESKAISDA | GATGGGAAGAAGTGGCAGACTTATCGAGGAAATTCCACTGGA |
| | QITASSYFTNMFATW | ACCTTAATGGTCTTCTTTGGCAATGTGGATTCATCTGGGATAA |
| | SPSKARLHLQGRSNA | AACACAATATTTTTAACCCTCCAATTATTGCTCGATACATCCGT |
| | WRPQVNNPKEWLQV | TTGCACCCAACTCATTATAGCATTCGCAGCACTCTTCGCATGG |
| | DFQKTMKVTGVTTQ | AGTTGATGGGCTGTGATTTAAATAGTTGCAGCATGCCATTGGG |
| | GVKSLLTSMYVKEFL | AATGGAGAGTAAAGCAATATCAGATGCACAGATTACTGCTTC |
| | ISSSQDGHQWTLFFQ | ATCCTACTTTACCAATATGTTTGCCACCTGGTCTCCTTCAAAAG |
| | NGKVKVFQGNQDSF | CTCGACTTCACCTCCAAGGGAGGAGTAATGCCTGGAGACCTCA |
| | TPVVNSLDPPLLTRYL | GGTGAATAATCCAAAAGAGTGGCTGCAAGTGGACTTCCAGAA |
| | RIHPQSWVHQIALRM | GACAATGAAAGTCACAGGAGTAACTACTCAGGGAGTAAAATC |
| | EVLGCEAQDLYGAGS | TCTGCTTACCAGCATGTATGTGAAGGAGTTCCTCATCTCCAGC |
| | PGAETAEQKLISEEDL | AGTCAAGATGGCCATCAGTGGACTCTCTTTTTTCAGAATGGCA |
| | SPATG | AAGTAAAGGTTTTTCAGGGAAATCAAGACTCCTTCACACCTGT |
| | | GGTGAACTCTCTAGACCCACCGTTACTGACTCGCTACCTTCGA |
| | | ATTCACCCCCAGAGTTGGGTGCACCAGATTGCCCTGAGGATGG |
| | | AGGTTCTGGGCTGCGAGGCACAGGACCTCTACGGCGCCGGAT |
| | | CACCTGGGGCCGAAACGGCCGAACAAAAACTCATCTCAGAAG |
| | | AGGATCTGTCACCTGCAACCGGTTGA |
| pBC0180 | MQIELSTCFFLCLLRF | ATGCAAATAGAGCTCTCCACCTGCTTCTTTCTGTGCCTTTTGCG |
| | CFSATRRYYLGAVEL | ATTCTGCTTTAGTGCCACCAGAAGATACTACCTGGGTGCAGTG |
| | SWDYMQSDLGELPV | GAACTGTCATGGGACTATATGCAAAGTGATCTCGGTGAGCTGC |
| | DARFPPRVPKSFPFNT | CTGTGGACGCAAGATTTCCTCCTAGAGTGCCAAAATCTTTTCC |
| | SVVYKKTLFVEFTDH | ATTCAACACCTCAGTCGTGTACAAAAAGACTCTGTTTGTAGAA |
| | LFNIAKPRPPWMGLL | TTCACGGATCACCTTTTCAACATCGCTAAGCCAAGGCCACCCT |
| | GPTIQAEVYDTVVITL | GGATGGGTCTGCTAGGTCCTACCATCCAGGCTGAGGTTTATGA |
| | KNMASHPVSLHAVG | TACAGTGGTCATTACACTTAAGAACATGGCTTCCCATCCTGTC |
| | VSYWKASEGAEYDD | AGTCTTCATGCTGTTGGTGTATCCTACTGGAAAGCTTCTGAGG |
| | QTSQREKEDDKVFPG | GAGCTGAATATGATGATCAGACCAGTCAAAGGGAGAAAGAAG |
| | GSHTYVWQVLKENG | ATGATAAAGTCTTCCCTGGTGGAAGCCATACATATGTCTGGCA |
| | PMASDPLCLTYSYLS | GGTCCTGAAAGAGAATGGTCCAATGGCCTCTGACCCACTGTGC |
| | HVDLVKDLNSGLIGA | CTTACCTACTCATATCTTTCTCATGTGGACCTGGTAAAAGACTT |
| | LLVCREGSLAKEKTQ | GAATTCAGGCCTCATTGGAGCCCTACTAGTATGTAGAGAAGGG |
| | TLHKFILLFAVFDEGK | AGTCTGGCCAAGGAAAAGACACAGACCTTGCACAAATTTATA |
| | SWHSETKNSLMQDR | CTACTTTTTGCTGTATTTGATGAAGGGAAAAGTTGGCACTCAG |
| | DAASARAWPKMHTV | AAACAAAGAACTCCTTGATGCAGGATAGGGATGCTGCATCTG |
| | NGYVNRSLPGLIGCH | CTCGGGCCTGGCCTAAAATGCACACAGTCAATGGTTATGTAAA |
| | RKSVYWHVIGMGTT | CAGGTCTCTGCCAGGTCTGATTGGATGCCACAGGAAATCAGTC |
| | PEVHSIFLEGHTFLVR | TATTGGCATGTGATTGGAATGGGCACCACTCCTGAAGTGCACT |
| | NHRQASLEISPITFLT | CAATATTCCTCGAAGGTCACACATTTCTTGTGAGGAACCATCG |
| | AQTLLMDLGQFLLFC | CCAGGCTAGCTTGGAAATCTCGCCAATAACTTTCCTTACTGCT |
| | HISSHQHDGMEAYVK | CAAACACTCTTGATGGACCTTGGACAGTTTCTACTGTTTTGTCA |
| | VDSCPEEPQLRMKNN | TATCTCTTCCCACCAACATGATGGCATGGAAGCTTATGTCAAA |
| | EEAEDYDDDLTDSEM | GTAGACAGCTGTCCAGAGGAACCCCAACTACGAATGAAAAAT |
| | DVVRFDDDNSPSFIQI | AATGAAGAAGCGGAAGACTATGATGATGATCTTACTGATTCTG |
| | RSVAKKHPKTWVHYI | AAATGGATGTGGTCAGGTTTGATGATGACAACTCTCCTTCCTT |
| | AAEEEDWDYAPLVL | TATCCAAATTCGCTCAGTTGCCAAGAAGCATCCTAAAACTTGG |
| | APDDRSYKSQYLNNG | GTACATTACATTGCTGCTGAAGAGGAGGACTGGGACTATGCTC |
| | PQRIGRKYKKVRFMA | CCTTAGTCCTCGCCCCCGATGACAGAAGTTATAAAAGTCAATA |
| | YTDETFKTREAIQHES | TTTGAACAATGGCCCTCAGCGGATTGGTAGGAAGTACAAAAA |
| | GILGPLLYGEVGDTL | AGTCCGATTTATGGCATACACAGATGAAACCTTTAAGACTCGT |
| | LIIFKNQASRPYNIYP | GAAGCTATTCAGCATGAATCAGGAATCTTGGGACCTTTACTTT |
| | HGITDVRPLYSRRLPK | ATGGGGAAGTTGGAGACACACTGTTGATTATATTTAAGAATCA |
| | GVKHLKDFPILPGEIF | AGCAAGCAGACCATATAACATCTACCCTCACGGAATCACTGAT |
| | KYKWTVTVEDGPTK | GTCCGTCCTTTGTATTCAAGGAGATTACCAAAAGGTGTAAAAC |
| | SDPRCLTRYYSSFVN | ATTTGAAGGATTTTCCAATTCTGCCAGGAGAAATATTCAAATA |
| | MERDLASGLIGPLLIC | TAAATGGACAGTGACTGTAGAAGATGGGCCAACTAAATCAGA |
| | YKESVDQRGNQIMSD | TCCTCGGTGCCTGACCCGCTATTACTCTAGTTTCGTTAATATGG |
| | KRNVILFSVFDENRS | AGAGAGATCTAGCTTCAGGACTCATTGGCCCTCTCCTCATCTG |
| | WYLTENIQRFLPNPA | CTACAAAGAATCTGTAGATCAAAGAGGAAACCAGATAATGTC |
| | GVQLEDPEFQASNIM | AGACAAGAGGAATGTCATCCTGTTTTCTGTATTTGATGAGAAC |
| | HSINGYVFDSLQLSV | CGAAGCTGGTACCTCACAGAGAATATACAACGCTTTCTCCCCA |
| | CLHEVAYWYILSIGA | ATCCAGCTGGAGTGCAGCTTGAGGATCCAGAGTTCCAAGCCTC |
| | QTDFLSVFFSGYTFK | CAACATCATGCACAGCATCAATGGCTATGTTTTTGATAGTTTG |
| | HKMVYEDTLTLFPFS | CAGTTGTCAGTTTGTTTGCATGAGGTGGCATACTGGTACATTCT |
| | GETVFMSMENPGLWI | AAGCATTGGAGCACAGACTGACTTCCTTTCTGTCTTCTTCTCTG |
| | LGCHNSDFRNRGMT | GATATACCTTCAAACACAAAATGGTCTATGAAGACACACTCAC |
| | ALLKVSSCDKNTGDY | CCTATTCCCATTCTCAGGAGAAACTGTCTTCATGTCGATGGAA |
| | YEDSYEDISAYLLSK | AACCCAGGTCTATGGATTCTGGGGTGCCACAACTCAGACTTTC |
| | NNAIEPRSFSQNPPVL | GGAACAGAGGCATGACCGCCTTACTGAAGGTTTCTAGTTGTGA |
| | KRHQREITRTTLQSD | CAAGAACACTGGTGATTATTACGAGGACAGTTATGAAGATATT |
| | QEEIDYDDTISVEMK | TCAGCATACTTGCTGAGTAAAAACAATGCCATTGAACCAAGA |
| | KEDFDIYDEDENQSP | AGCTTCTCTCAAAACCCACCAGTCTTGAAACGCCATCAACGGG |
| | RSFQKKTRHYFIAAV | AAATAACTCGTACTACTCTTCAGTCAGATCAAGAGGAAATCGA |
| | ERLWDYGMSSSPHVL | TTATGATGATACCATATCAGTTGAAATGAAGAAGGAAGATTTT |
| | RNRAQSGSVPQFKKV | GACATTTATGATGAGGATGAAAATCAGAGCCCCCGCAGCTTTC |
| | VFQEFTDGSFTQPLY | AAAAGAAAACACGACACTATTTTATTGCTGCAGTGGAGAGGC |
| | RGELNEHLGLLGPYI | TCTGGGATTATGGGATGAGTAGCTCCCCACATGTTCTAAGAAA |
| | RAEVEDNIMVTFRNQ | CAGGGCTCAGAGTGGCAGTGTCCCTCAGTTCAAGAAAGTTGTT |
| | ASRPYSFYSSLISYEE | TTCCAGGAATTTACTGATGGCTCCTTTACTCAGCCCTTATACCG |
| | DQRQGAEPRKNFVKP | TGGAGAACTAAATGAACATTTGGGACTCCTGGGGCCATATATA |
| | NETKTYFWKVQHHM | AGAGCAGAAGTTGAAGATAATATCATGGTAACTTTCAGAAAT |
| | APTKDEFDCKAWAY | CAGGCCTCTCGTCCCTATTCCTTCTATTCTAGCCTTATTTCTTAT |
| | FSDVDLEKDVHSGLI | GAGGAAGATCAGAGGCAAGGAGCAGAACCTAGAAAAAACTTT |
| | GPLLVCHTNTLNPAH | GTCAAGCCTAATGAAACCAAAACTTACTTTTGGAAAGTGCAAC |
| | GRQVTVQEFALFFTIF | ATCATATGGCACCCACTAAAGATGAGTTTGACTGCAAAGCCTG |
| | DETKSWYFTENMER | GGCTTATTTCTCTGATGTTGACCTGGAAAAAGATGTGCACTCA |
| | NCRAPCNIQMEDPTF | GGCCTGATTGGACCCCTTCTGGTCTGCCACACTAACACACTGA |
| | KENYRFHAINGYIMD | ACCCTGCTCATGGGAGACAAGTGACAGTACAGGAATTTGCTCT |
| | TLPGLVMAQDQRIR | GTTTTTCACCATCTTTGATGAGACCAAAAGCTGGTACTTCACT |
| | WYLLSMGSNENIHSI | GAAAATATGGAAAGAAACTGCAGGGCTCCCTGCAATATCCAG |
| | HFSGHVFTVRKKEEY | ATGGAAGATCCCACTTTTAAAGAGAATTATCGCTTCCATGCAA |
| | KMALYNLYPGVFET | TCAATGGCTACATAATGGATACACTACCTGGCTTAGTAATGGC |
| | VEMLPSKAGIWRVEC | TCAGGATCAAAGGATTCGATGGTATCTGCTCAGCATGGGCAGC |
| | LIGEHLHAGMSTLFL | AATGAAAACATCCATTCTATTCATTTCAGTGGACATGTGTTCA |
| | VYSNKCQTPLGMAS | CTGTACGAAAAAAAGAGGAGTATAAAATGGCACTGTACAATC |
| | GHIRDFQITASGQYG | TCTATCCAGGTGTTTTTGAGACAGTGGAAATGTTACCATCCAA |
| | QWAPKLARLHYSGSI | AGCTGGAATTTGGCGGGTGGAATGCCTTATTGGCGAGCATCTA |
| | NAWSTKEPFSWIKVD | CATGCTGGGATGAGCACACTTTTTCTGGTGTACAGCAATAAGT |
| | LLAPMIIHGIKTQGAR | GTCAGACTCCCCTGGGAATGGCTTCTGGACACATTAGAGATTT |
| | QKFSSLYISQFIIMYSL | TCAGATTACAGCTTCAGGACAATATGGACAGTGGGCCCCAAA |
| | DGKKGAPGSPAGSPT | GCTGGCCAGACTTCATTATTCCGGATCAATCAATGCCTGGAGC |
| | STEEGTSESATPESGP | ACCAAGGAGCCCTTTTCTTGGATCAAGGTGGATCTGTTGGCAC |
| | GSEPATSGSETPASSW | CAATGATTATTCACGGCATCAAGACCCAGGGTGCCCGTCAGAA |
| | QTYRGNSTGTLMVFF | GTTCTCCAGCCTCTACATCTCTCAGTTTATCATCATGTATAGTC |
| | GNVDSSGIKHNIFNPP | TTGATGGGAAGAAGGGCGCGCCAGGTTCTCCTGCTGGCTCCCC |
| | IIARYIRLHPTHYSIRS | CACCTCAACAGAAGAGGGGACAAGCGAAAGCGCTACGCCTGA |
| | TLRMELMGCDLNSCS | GAGTGGCCCTGGCTCTGAGCCAGCCACCTCCGGCTCTGAAACC |
| | MPLGMESKAISDAQI | CCTGCCTCGAGCTGGCAGACTTATCGAGGAAATTCCACTGGAA |
| | TASSYFTNMFATWSP | CCTTAATGGTCTTCTTTGGCAATGTGGATTCATCTGGGATAAA |
| | SKARLHLQGRSNAW | ACACAATATTTTTAACCCTCCAATTATTGCTCGATACATCCGTT |
| | RPQVNNPKEWLQVD | TGCACCCAACTCATTATAGCATTCGCAGCACTCTTCGCATGGA |
| | FQKTMKVTGVTTQG | GTTGATGGGCTGTGATTTAAATAGTTGCAGCATGCCATTGGGA |
| | VKSLLTSMYVKEFLIS | ATGGAGAGTAAAGCAATATCAGATGCACAGATTACTGCTTCAT |
| | SSQDGHQWTLFFQNG | CCTACTTTACCAATATGTTTGCCACCTGGTCTCCTTCAAAAGCT |
| | KVKVFQGNQDSFTPV | CGACTTCACCTCCAAGGGAGGAGTAATGCCTGGAGACCTCAG |
| | VNSLDPPLLTRYLRIH | GTGAATAATCCAAAAGAGTGGCTGCAAGTGGACTTCCAGAAG |
| | PQSWVHQIALRMEVL | ACAATGAAAGTCACAGGAGTAACTACTCAGGGAGTAAAATCT |
| | GCEAQDLYGAGSPG | CTGCTTACCAGCATGTATGTGAAGGAGTTCCTCATCTCCAGCA |
| | AETAEQKLISEEDLSP | GTCAAGATGGCCATCAGTGGACTCTCTTTTTTCAGAATGGCAA |
| | ATG | AGTAAAGGTTTTTCAGGGAAATCAAGACTCCTTCACACCTGTG |
| | | GTGAACTCTCTAGACCCACCGTTACTGACTCGCTACCTTCGAA |
| | | TTCACCCCCAGAGTTGGGTGCACCAGATTGCCCTGAGGATGGA |
| | | GGTTCTGGGCTGCGAGGCACAGGACCTCTACGGCGCCGGATC |
| | | ACCTGGGGCCGAAACGGCCGAACAAAAACTCATCTCAGAAGA |
| | | GGATCTGTCACCTGCAACCGGTTGA |
| pBC0142 | MQIELSTCFFLCLLRF | ATGCAAATAGAGCTCTCCACCTGCTTCTTTCTGTGCCTTTTGCG |
| | CFSATRRYYLGAVEL | ATTCTGCTTTAGTGCCACCAGAAGATACTACCTGGGTGCAGTG |
| | SWDYMQSDLGELPV | GAACTGTCATGGGACTATATGCAAAGTGATCTCGGTGAGCTGC |
| | DARFPPRVPKSFPFNT | CTGTGGACGCAAGATTTCCTCCTAGAGTGCCAAAATCTTTTCC |
| | SVVYKKTLFVEFTDH | ATTCAACACCTCAGTCGTGTACAAAAAGACTCTGTTTGTAGAA |
| | LFNIAKPRPPWMGLL | TTCACGGATCACCTTTTCAACATCGCTAAGCCAAGGCCACCCT |
| | GPTIQAEVYDTVVITL | GGATGGGTCTGCTAGGTCCTACCATCCAGGCTGAGGTTTATGA |
| | KNMASHPVSLHAVG | TACAGTGGTCATTACACTTAAGAACATGGCTTCCCATCCTGTC |
| | VSYWKASEGAEYDD | AGTCTTCATGCTGTTGGTGTATCCTACTGGAAAGCTTCTGAGG |
| | QTSQREKEDDKVFPG | GAGCTGAATATGATGATCAGACCAGTCAAAGGGAGAAAGAAG |
| | GSHTYVWQVLKENG | ATGATAAAGTCTTCCCTGGTGGAAGCCATACATATGTCTGGCA |
| | PMASDPLCLTYSYLS | GGTCCTGAAAGAGAATGGTCCAATGGCCTCTGACCCACTGTGC |
| | HVDLVKDLNSGLIGA | CTTACCTACTCATATCTTTCTCATGTGGACCTGGTAAAAGACTT |
| | LLVCREGSLAKEKTQ | GAATTCAGGCCTCATTGGAGCCCTACTAGTATGTAGAGAAGGG |
| | TLHKFILLFAVFDEGK | AGTCTGGCCAAGGAAAAGACACAGACCTTGCACAAATTTATA |
| | SWHSETKNSLMQDR | CTACTTTTTGCTGTATTTGATGAAGGGAAAAGTTGGCACTCAG |
| | DAASARAWPKMHTV | AAACAAAGAACTCCTTGATGCAGGATAGGGATGCTGCATCTG |
| | NGYVNRSLPGLIGCH | CTCGGGCCTGGCCTAAAATGCACACAGTCAATGGTTATGTAAA |
| | RKSVYWHVIGMGTT | CAGGTCTCTGCCAGGTCTGATTGGATGCCACAGGAAATCAGTC |
| | PEVHSIFLEGHTFLVR | TATTGGCATGTGATTGGAATGGGCACCACTCCTGAAGTGCACT |
| | NHRQASLEISPITFLT | CAATATTCCTCGAAGGTCACACATTTCTTGTGAGGAACCATCG |
| | AQTLLMDLGQFLLFC | CCAGGCTAGCTTGGAAATCTCGCCAATAACTTTCCTTACTGCT |
| | HISSHQHDGMEAYVK | CAAACACTCTTGATGGACCTTGGACAGTTTCTACTGTTTTGTCA |
| | VDSCPEEPQLRMKNN | TATCTCTTCCCACCAACATGATGGCATGGAAGCTTATGTCAAA |
| | EEAEDYDDDLTDSEM | GTAGACAGCTGTCCAGAGGAACCCCAACTACGAATGAAAAAT |
| | DVVRFDDDNSPSFIQI | AATGAAGAAGCGGAAGACTATGATGATGATCTTACTGATTCTG |
| | RSVAKKHPKTWVHYI | AAATGGATGTGGTCAGGTTTGATGATGACAACTCTCCTTCCTT |
| | AAEEEDWDYAPLVL | TATCCAAATTCGCTCAGTTGCCAAGAAGCATCCTAAAACTTGG |
| | APDDRSYKSQYLNNG | GTACATTACATTGCTGCTGAAGAGGAGGACTGGGACTATGCTC |
| | PQRIGRKYKKVRFMA | CCTTAGTCCTCGCCCCCGATGACAGAAGTTATAAAAGTCAATA |
| | YTDETFKTREAIQHES | TTTGAACAATGGCCCTCAGCGGATTGGTAGGAAGTACAAAAA |
| | GILGPLLYGEVGDTL | AGTCCGATTTATGGCATACACAGATGAAACCTTTAAGACTCGT |
| | LIIFKNQASRPYNIYP | GAAGCTATTCAGCATGAATCAGGAATCTTGGGACCTTTACTTT |
| | HGITDVRPLYSRRLPK | ATGGGGAAGTTGGAGACACACTGTTGATTATATTTAAGAATCA |
| | GVKHLKDFPILPGEIF | AGCAAGCAGACCATATAACATCTACCCTCACGGAATCACTGAT |
| | KYKWTVTVEDGPTK | GTCCGTCCTTTGTATTCAAGGAGATTACCAAAAGGTGTAAAAC |
| | SDPRCLTRYYSSFVN | ATTTGAAGGATTTTCCAATTCTGCCAGGAGAAATATTCAAATA |
| | MERDLASGLIGPLLIC | TAAATGGACAGTGACTGTAGAAGATGGGCCAACTAAATCAGA |
| | YKESVDQRGNQIMSD | TCCTCGGTGCCTGACCCGCTATTACTCTAGTTTCGTTAATATGG |
| | KRNVILFSVFDENRS | AGAGAGATCTAGCTTCAGGACTCATTGGCCCTCTCCTCATCTG |
| | WYLTENIQRFLPNPA | CTACAAAGAATCTGTAGATCAAAGAGGAAACCAGATAATGTC |
| | GVQLEDPEFQASNIM | AGACAAGAGGAATGTCATCCTGTTTTCTGTATTTGATGAGAAC |
| | HSINGYVFDSLQLSV | CGAAGCTGGTACCTCACAGAGAATATACAACGCTTTCTCCCCA |
| | CLHEVAYWYILSIGA | ATCCAGCTGGAGTGCAGCTTGAGGATCCAGAGTTCCAAGCCTC |
| | QTDFLSVFFSGYTFK | CAACATCATGCACAGCATCAATGGCTATGTTTTTGATAGTTTG |
| | HKMVYEDTLTLFPFS | CAGTTGTCAGTTTGTTTGCATGAGGTGGCATACTGGTACATTCT |
| | GETVFMSMENPGLWI | AAGCATTGGAGCACAGACTGACTTCCTTTCTGTCTTCTTCTCTG |
| | LGCHNSDFRNRGMT | GATATACCTTCAAACACAAAATGGTCTATGAAGACACACTCAC |
| | ALLKVSSCDKNTGDY | CCTATTCCCATTCTCAGGAGAAACTGTCTTCATGTCGATGGAA |
| | YEDSYEDISAYLLSK | AACCCAGGTCTATGGATTCTGGGGTGCCACAACTCAGACTTTC |
| | NNAIEPRSFSQNPPVL | GGAACAGAGGCATGACCGCCTTACTGAAGGTTTCTAGTTGTGA |
| | KRHQREITRTTLQSD | CAAGAACACTGGTGATTATTACGAGGACAGTTATGAAGATATT |
| | QEEIDYDDTISVEMK | TCAGCATACTTGCTGAGTAAAAACAATGCCATTGAACCAAGA |
| | KEDFDIYDEDENQSP | AGCTTCTCTCAAAACCCACCAGTCTTGAAACGCCATCAACGGG |
| | RSFQKKTRHYFIAAV | AAATAACTCGTACTACTCTTCAGTCAGATCAAGAGGAAATCGA |
| | ERLWDYGMSSSPHVL | TTATGATGATACCATATCAGTTGAAATGAAGAAGGAAGATTTT |
| | RNRAQSGSVPQFKKV | GACATTTATGATGAGGATGAAAATCAGAGCCCCCGCAGCTTTC |
| | VFQEFTDGSFTQPLY | AAAAGAAAACACGACACTATTTTATTGCTGCAGTGGAGAGGC |
| | RGELNEHLGLLGPYI | TCTGGGATTATGGGATGAGTAGCTCCCCACATGTTCTAAGAAA |
| | RAEVEDNIMVTFRNQ | CAGGGCTCAGAGTGGCAGTGTCCCTCAGTTCAAGAAAGTTGTT |
| | ASRPYSFYSSLISYEE | TTCCAGGAATTTACTGATGGCTCCTTTACTCAGCCCTTATACCG |
| | DQRQGAEPRKNFVKP | TGGAGAACTAAATGAACATTTGGGACTCCTGGGGCCATATATA |
| | NETKTYFWKVQHHM | AGAGCAGAAGTTGAAGATAATATCATGGTAACTTTCAGAAAT |
| | APTKDEFDCKAWAY | CAGGCCTCTCGTCCCTATTCCTTCTATTCTAGCCTTATTTCTTAT |
| | FSDVDLEKDVHSGLI | GAGGAAGATCAGAGGCAAGGAGCAGAACCTAGAAAAAACTTT |
| | GPLLVCHTNTLNPAH | GTCAAGCCTAATGAAACCAAAACTTACTTTTGGAAAGTGCAAC |
| | GRQVTVQEFALFFTIF | ATCATATGGCACCCACTAAAGATGAGTTTGACTGCAAAGCCTG |
| | DETKSWYFTENMER | GGCTTATTTCTCTGATGTTGACCTGGAAAAAGATGTGCACTCA |
| | NCRAPCNIQMEDPTF | GGCCTGATTGGACCCCTTCTGGTCTGCCACACTAACACACTGA |
| | KENYRFHAINGYIMD | ACCCTGCTCATGGGAGACAAGTGACAGTACAGGAATTTGCTCT |
| | TLPGLVMAQDQRIR | GTTTTTCACCATCTTTGATGAGACCAAAAGCTGGTACTTCACT |
| | WYLLSMGSNENIHSI | GAAAATATGGAAAGAAACTGCAGGGCTCCCTGCAATATCCAG |
| | HFSGHVFTVRKKEEY | ATGGAAGATCCCACTTTTAAAGAGAATTATCGCTTCCATGCAA |
| | KMALYNLYPGVFET | TCAATGGCTACATAATGGATACACTACCTGGCTTAGTAATGGC |
| | VEMLPSKAGIWRVEC | TCAGGATCAAAGGATTCGATGGTATCTGCTCAGCATGGGCAGC |
| | LIGEHLHAGMSTLFL | AATGAAAACATCCATTCTATTCATTTCAGTGGACATGTGTTCA |
| | VYSNKCQTPLGMAS | CTGTACGAAAAAAAGAGGAGTATAAAATGGCACTGTACAATC |
| | GHIRDFQITASGQYG | TCTATCCAGGTGTTTTTGAGACAGTGGAAATGTTACCATCCAA |
| | QWAPKLARLHYSGSI | AGCTGGAATTTGGCGGGTGGAATGCCTTATTGGCGAGCATCTA |
| | NAWSTKEPFSWIKVD | CATGCTGGGATGAGCACACTTTTTCTGGTGTACAGCAATAAGT |
| | LLAPMIIHGIKTQGAR | GTCAGACTCCCCTGGGAATGGCTTCTGGACACATTAGAGATTT |
| | QKFSSLYISQFIIMYSL | TCAGATTACAGCTTCAGGACAATATGGACAGTGGGCCCCAAA |
| | DGKKWQTYRGNSTG | GCTGGCCAGACTTCATTATTCCGGATCAATCAATGCCTGGAGC |
| | APGSPAGSPTSTEEGT | ACCAAGGAGCCCTTTTCTTGGATCAAGGTGGATCTGTTGGCAC |
| | SESATPESGPGSEPAT | CAATGATTATTCACGGCATCAAGACCCAGGGTGCCCGTCAGAA |
| | SGSETPASSGTLMVFF | GTTCTCCAGCCTCTACATCTCTCAGTTTATCATCATGTATAGTC |
| | GNVDSSGIKHNIFNPP | TTGATGGGAAGAAGTGGCAGACTTATCGAGGAAATTCCACTG |
| | IIARYIRLHPTHYSIRS | GCGCGCCAGGTTCTCCTGCTGGCTCCCCCACCTCAACAGAAGA |
| | TLRMELMGCDLNSCS | GGGGACAAGCGAAAGCGCTACGCCTGAGAGTGGCCCTGGCTC |
| | MPLGMESKAISDAQI | TGAGCCAGCCACCTCCGGCTCTGAAACCCCTGCCTCGAGCGGA |
| | TASSYFTNMFATWSP | ACCTTAATGGTCTTCTTTGGCAATGTGGATTCATCTGGGATAA |
| | SKARLHLQGRSNAW | AACACAATATTTTTAACCCTCCAATTATTGCTCGATACATCCGT |
| | RPQVNNPKEWLQVD | TTGCACCCAACTCATTATAGCATTCGCAGCACTCTTCGCATGG |
| | FQKTMKVTGVTTQG | AGTTGATGGGCTGTGATTTAAATAGTTGCAGCATGCCATTGGG |
| | VKSLLTSMYVKEFLIS | AATGGAGAGTAAAGCAATATCAGATGCACAGATTACTGCTTC |
| | SSQDGHQWTLFFQNG | ATCCTACTTTACCAATATGTTTGCCACCTGGTCTCCTTCAAAAG |
| | KVKVFQGNQDSFTPV | CTCGACTTCACCTCCAAGGGAGGAGTAATGCCTGGAGACCTCA |
| | VNSLDPPLLTRYLRIH | GGTGAATAATCCAAAAGAGTGGCTGCAAGTGGACTTCCAGAA |
| | PQSWVHQIALRMEVL | GACAATGAAAGTCACAGGAGTAACTACTCAGGGAGTAAAATC |
| | GCEAQDLYGAGSPG | TCTGCTTACCAGCATGTATGTGAAGGAGTTCCTCATCTCCAGC |
| | AETAEQKLISEEDLSP | AGTCAAGATGGCCATCAGTGGACTCTCTTTTTTCAGAATGGCA |
| | ATG | AAGTAAAGGTTTTTCAGGGAAATCAAGACTCCTTCACACCTGT |
| | | GGTGAACTCTCTAGACCCACCGTTACTGACTCGCTACCTTCGA |
| | | ATTCACCCCCAGAGTTGGGTGCACCAGATTGCCCTGAGGATGG |
| | | AGGTTCTGGGCTGCGAGGCACAGGACCTCTACGGCGCCGGAT |
| | | CACCTGGGGCCGAAACGGCCGAACAAAAACTCATCTCAGAAG |
| | | AGGATCTGTCACCTGCAACCGGTTGA |
| pBC0143 | MQIELSTCFFLCLLRF | ATGCAAATAGAGCTCTCCACCTGCTTCTTTCTGTGCCTTTTGCG |
| | CFSATRRYYLGAVEL | ATTCTGCTTTAGTGCCACCAGAAGATACTACCTGGGTGCAGTG |
| | SWDYMQSDLGELPV | GAACTGTCATGGGACTATATGCAAAGTGATCTCGGTGAGCTGC |
| | DARFPPRVPKSFPFNT | CTGTGGACGCAAGATTTCCTCCTAGAGTGCCAAAATCTTTTCC |
| | SVVYKKTLFVEFTDH | ATTCAACACCTCAGTCGTGTACAAAAAGACTCTGTTTGTAGAA |
| | LFNIAKPRPPWMGLL | TTCACGGATCACCTTTTCAACATCGCTAAGCCAAGGCCACCCT |
| | GPTIQAEVYDTVVITL | GGATGGGTCTGCTAGGTCCTACCATCCAGGCTGAGGTTTATGA |
| | KNMASHPVSLHAVG | TACAGTGGTCATTACACTTAAGAACATGGCTTCCCATCCTGTC |
| | VSYWKASEGAEYDD | AGTCTTCATGCTGTTGGTGTATCCTACTGGAAAGCTTCTGAGG |
| | QTSQREKEDDKVFPG | GAGCTGAATATGATGATCAGACCAGTCAAAGGGAGAAAGAAG |
| | GSHTYVWQVLKENG | ATGATAAAGTCTTCCCTGGTGGAAGCCATACATATGTCTGGCA |
| | PMASDPLCLTYSYLS | GGTCCTGAAAGAGAATGGTCCAATGGCCTCTGACCCACTGTGC |
| | HVDLVKDLNSGLIGA | CTTACCTACTCATATCTTTCTCATGTGGACCTGGTAAAAGACTT |
| | LLVCREGSLAKEKTQ | GAATTCAGGCCTCATTGGAGCCCTACTAGTATGTAGAGAAGGG |
| | TLHKFILLFAVFDEGK | AGTCTGGCCAAGGAAAAGACACAGACCTTGCACAAATTTATA |
| | SWHSETKNSLMQDR | CTACTTTTTGCTGTATTTGATGAAGGGAAAAGTTGGCACTCAG |
| | DAASARAWPKMHTV | AAACAAAGAACTCCTTGATGCAGGATAGGGATGCTGCATCTG |
| | NGYVNRSLPGLIGCH | CTCGGGCCTGGCCTAAAATGCACACAGTCAATGGTTATGTAAA |
| | RKSVYWHVIGMGTT | CAGGTCTCTGCCAGGTCTGATTGGATGCCACAGGAAATCAGTC |
| | PEVHSIFLEGHTFLVR | TATTGGCATGTGATTGGAATGGGCACCACTCCTGAAGTGCACT |
| | NHRQASLEISPITFLT | CAATATTCCTCGAAGGTCACACATTTCTTGTGAGGAACCATCG |
| | AQTLLMDLGQFLLFC | CCAGGCTAGCTTGGAAATCTCGCCAATAACTTTCCTTACTGCT |
| | HISSHQHDGMEAYVK | CAAACACTCTTGATGGACCTTGGACAGTTTCTACTGTTTTGTCA |
| | VDSCPEEPQLRMKNN | TATCTCTTCCCACCAACATGATGGCATGGAAGCTTATGTCAAA |
| | EEAEDYDDDLTDSEM | GTAGACAGCTGTCCAGAGGAACCCCAACTACGAATGAAAAAT |
| | DVVRFDDDNSPSFIQI | AATGAAGAAGCGGAAGACTATGATGATGATCTTACTGATTCTG |
| | RSVAKKHPKTWVHYI | AAATGGATGTGGTCAGGTTTGATGATGACAACTCTCCTTCCTT |
| | AAEEEDWDYAPLVL | TATCCAAATTCGCTCAGTTGCCAAGAAGCATCCTAAAACTTGG |
| | APDDRSYKSQYLNNG | GTACATTACATTGCTGCTGAAGAGGAGGACTGGGACTATGCTC |
| | PQRIGRKYKKVRFMA | CCTTAGTCCTCGCCCCCGATGACAGAAGTTATAAAAGTCAATA |
| | YTDETFKTREAIQHES | TTTGAACAATGGCCCTCAGCGGATTGGTAGGAAGTACAAAAA |
| | GILGPLLYGEVGDTL | AGTCCGATTTATGGCATACACAGATGAAACCTTTAAGACTCGT |
| | LIIFKNQASRPYNIYP | GAAGCTATTCAGCATGAATCAGGAATCTTGGGACCTTTACTTT |
| | HGITDVRPLYSRRLPK | ATGGGGAAGTTGGAGACACACTGTTGATTATATTTAAGAATCA |
| | GVKHLKDFPILPGEIF | AGCAAGCAGACCATATAACATCTACCCTCACGGAATCACTGAT |
| | KYKWTVTVEDGPTK | GTCCGTCCTTTGTATTCAAGGAGATTACCAAAAGGTGTAAAAC |
| | SDPRCLTRYYSSFVN | ATTTGAAGGATTTTCCAATTCTGCCAGGAGAAATATTCAAATA |
| | MERDLASGLIGPLLIC | TAAATGGACAGTGACTGTAGAAGATGGGCCAACTAAATCAGA |
| | YKESVDQRGNQIMSD | TCCTCGGTGCCTGACCCGCTATTACTCTAGTTTCGTTAATATGG |
| | KRNVILFSVFDENRS | AGAGAGATCTAGCTTCAGGACTCATTGGCCCTCTCCTCATCTG |
| | WYLTENIQRFLPNPA | CTACAAAGAATCTGTAGATCAAAGAGGAAACCAGATAATGTC |
| | GVQLEDPEFQASNIM | AGACAAGAGGAATGTCATCCTGTTTTCTGTATTTGATGAGAAC |
| | HSINGYVFDSLQLSV | CGAAGCTGGTACCTCACAGAGAATATACAACGCTTTCTCCCCA |
| | CLHEVAYWYILSIGA | ATCCAGCTGGAGTGCAGCTTGAGGATCCAGAGTTCCAAGCCTC |
| | QTDFLSVFFSGYTFK | CAACATCATGCACAGCATCAATGGCTATGTTTTTGATAGTTTG |
| | HKMVYEDTLTLFPFS | CAGTTGTCAGTTTGTTTGCATGAGGTGGCATACTGGTACATTCT |
| | GETVFMSMENPGLWI | AAGCATTGGAGCACAGACTGACTTCCTTTCTGTCTTCTTCTCTG |
| | LGCHNSDFRNRGMT | GATATACCTTCAAACACAAAATGGTCTATGAAGACACACTCAC |
| | ALLKVSSCDKNTGDY | CCTATTCCCATTCTCAGGAGAAACTGTCTTCATGTCGATGGAA |
| | YEDSYEDISAYLLSK | AACCCAGGTCTATGGATTCTGGGGTGCCACAACTCAGACTTTC |
| | NNAIEPRSFSQNPPVL | GGAACAGAGGCATGACCGCCTTACTGAAGGTTTCTAGTTGTGA |
| | KRHQREITRTTLQSD | CAAGAACACTGGTGATTATTACGAGGACAGTTATGAAGATATT |
| | QEEIDYDDTISVEMK | TCAGCATACTTGCTGAGTAAAAACAATGCCATTGAACCAAGA |
| | KEDFDIYDEDENQSP | AGCTTCTCTCAAAACCCACCAGTCTTGAAACGCCATCAACGGG |
| | RSFQKKTRHYFIAAV | AAATAACTCGTACTACTCTTCAGTCAGATCAAGAGGAAATCGA |
| | ERLWDYGMSSSPHVL | TTATGATGATACCATATCAGTTGAAATGAAGAAGGAAGATTTT |
| | RNRAQSGSVPQFKKV | GACATTTATGATGAGGATGAAAATCAGAGCCCCCGCAGCTTTC |
| | VFQEFTDGSFTQPLY | AAAAGAAAACACGACACTATTTTATTGCTGCAGTGGAGAGGC |
| | RGELNEHLGLLGPYI | TCTGGGATTATGGGATGAGTAGCTCCCCACATGTTCTAAGAAA |
| | RAEVEDNIMVTFRNQ | CAGGGCTCAGAGTGGCAGTGTCCCTCAGTTCAAGAAAGTTGTT |
| | ASRPYSFYSSLISYEE | TTCCAGGAATTTACTGATGGCTCCTTTACTCAGCCCTTATACCG |
| | DQRQGAEPRKNFVKP | TGGAGAACTAAATGAACATTTGGGACTCCTGGGGCCATATATA |
| | NETKTYFWKVQHHM | AGAGCAGAAGTTGAAGATAATATCATGGTAACTTTCAGAAAT |
| | APTKDEFDCKAWAY | CAGGCCTCTCGTCCCTATTCCTTCTATTCTAGCCTTATTTCTTAT |
| | FSDVDLEKDVHSGLI | GAGGAAGATCAGAGGCAAGGAGCAGAACCTAGAAAAAACTTT |
| | GPLLVCHTNTLNPAH | GTCAAGCCTAATGAAACCAAAACTTACTTTTGGAAAGTGCAAC |
| | GRQVTVQEFALFFTIF | ATCATATGGCACCCACTAAAGATGAGTTTGACTGCAAAGCCTG |
| | DETKSWYFTENMER | GGCTTATTTCTCTGATGTTGACCTGGAAAAAGATGTGCACTCA |
| | NCRAPCNIQMEDPTF | GGCCTGATTGGACCCCTTCTGGTCTGCCACACTAACACACTGA |
| | KENYRFHAINGYIMD | ACCCTGCTCATGGGAGACAAGTGACAGTACAGGAATTTGCTCT |
| | TLPGLVMAQDQRIR | GTTTTTCACCATCTTTGATGAGACCAAAAGCTGGTACTTCACT |
| | WYLLSMGSNENIHSI | GAAAATATGGAAAGAAACTGCAGGGCTCCCTGCAATATCCAG |
| | HFSGHVFTVRKKEEY | ATGGAAGATCCCACTTTTAAAGAGAATTATCGCTTCCATGCAA |
| | KMALYNLYPGVFET | TCAATGGCTACATAATGGATACACTACCTGGCTTAGTAATGGC |
| | VEMLPSKAGIWRVEC | TCAGGATCAAAGGATTCGATGGTATCTGCTCAGCATGGGCAGC |
| | LIGEHLHAGMSTLFL | AATGAAAACATCCATTCTATTCATTTCAGTGGACATGTGTTCA |
| | VYSNKCQTPLGMAS | CTGTACGAAAAAAAGAGGAGTATAAAATGGCACTGTACAATC |
| | GHIRDFQITASGQYG | TCTATCCAGGTGTTTTTGAGACAGTGGAAATGTTACCATCCAA |
| | QWAPKLARLHYSGSI | AGCTGGAATTTGGCGGGTGGAATGCCTTATTGGCGAGCATCTA |
| | NAWSTKEPFSWIKVD | CATGCTGGGATGAGCACACTTTTTCTGGTGTACAGCAATAAGT |
| | LLAPMIIHGIKTQGAR | GTCAGACTCCCCTGGGAATGGCTTCTGGACACATTAGAGATTT |
| | QKFSSLYISQFIIMYSL | TCAGATTACAGCTTCAGGACAATATGGACAGTGGGCCCCAAA |
| | DGKKWQTYRGNSTG | GCTGGCCAGACTTCATTATTCCGGATCAATCAATGCCTGGAGC |
| | TLMVFFGNVDSSGIK | ACCAAGGAGCCCTTTTCTTGGATCAAGGTGGATCTGTTGGCAC |
| | HNIFNPPIIARYIRLHP | CAATGATTATTCACGGCATCAAGACCCAGGGTGCCCGTCAGAA |
| | THYSIRSTLRMELMG | GTTCTCCAGCCTCTACATCTCTCAGTTTATCATCATGTATAGTC |
| | CDLGAPGSPAGSPTST | TTGATGGGAAGAAGTGGCAGACTTATCGAGGAAATTCCACTG |
| | EEGTSESATPESGPGS | GAACCTTAATGGTCTTCTTTGGCAATGTGGATTCATCTGGGAT |
| | EPATSGSETPASSNSC | AAAACACAATATTTTTAACCCTCCAATTATTGCTCGATACATC |
| | SMPLGMESKAISDAQ | CGTTTGCACCCAACTCATTATAGCATTCGCAGCACTCTTCGCAT |
| | ITASSYFTNMFATWS | GGAGTTGATGGGCTGTGATTTAGGCGCGCCAGGTTCTCCTGCT |
| | PSKARLHLQGRSNA | GGCTCCCCCACCTCAACAGAAGAGGGGACAAGCGAAAGCGCT |
| | WRPQVNNPKEWLQV | ACGCCTGAGAGTGGCCCTGGCTCTGAGCCAGCCACCTCCGGCT |
| | DFQKTMKVTGVTTQ | CTGAAACCCCTGCCTCGAGCAATAGTTGCAGCATGCCATTGGG |
| | GVKSLLTSMYVKEFL | AATGGAGAGTAAAGCAATATCAGATGCACAGATTACTGCTTC |
| | ISSSQDGHQWTLFFQ | ATCCTACTTTACCAATATGTTTGCCACCTGGTCTCCTTCAAAAG |
| | NGKVKVFQGNQDSF | CTCGACTTCACCTCCAAGGGAGGAGTAATGCCTGGAGACCTCA |
| | TPVVNSLDPPLLTRYL | GGTGAATAATCCAAAAGAGTGGCTGCAAGTGGACTTCCAGAA |
| | RIHPQSWVHQIALRM | GACAATGAAAGTCACAGGAGTAACTACTCAGGGAGTAAAATC |
| | EVLGCEAQDLYGAGS | TCTGCTTACCAGCATGTATGTGAAGGAGTTCCTCATCTCCAGC |
| | PGAETAEQKLISEEDL | AGTCAAGATGGCCATCAGTGGACTCTCTTTTTTCAGAATGGCA |
| | SPATG | AAGTAAAGGTTTTTCAGGGAAATCAAGACTCCTTCACACCTGT |
| | | GGTGAACTCTCTAGACCCACCGTTACTGACTCGCTACCTTCGA |
| | | ATTCACCCCCAGAGTTGGGTGCACCAGATTGCCCTGAGGATGG |
| | | AGGTTCTGGGCTGCGAGGCACAGGACCTCTACGGCGCCGGAT |
| | | CACCTGGGGCCGAAACGGCCGAACAAAAACTCATCTCAGAAG |
| | | AGGATCTGTCACCTGCAACCGGTTGA |
| pBC0181 | MQIELSTCFFLCLLRF | ATGCAAATAGAGCTCTCCACCTGCTTCTTTCTGTGCCTTTTGCG |
| | CFSATRRYYLGAVEL | ATTCTGCTTTAGTGCCACCAGAAGATACTACCTGGGTGCAGTG |
| | SWDYMQSDLGELPV | GAACTGTCATGGGACTATATGCAAAGTGATCTCGGTGAGCTGC |
| | DARFPPRVPKSFPFNT | CTGTGGACGCAAGATTTCCTCCTAGAGTGCCAAAATCTTTTCC |
| | SVVYKKTLFVEFTDH | ATTCAACACCTCAGTCGTGTACAAAAAGACTCTGTTTGTAGAA |
| | LFNIAKPRPPWMGLL | TTCACGGATCACCTTTTCAACATCGCTAAGCCAAGGCCACCCT |
| | GPTIQAEVYDTVVITL | GGATGGGTCTGCTAGGTCCTACCATCCAGGCTGAGGTTTATGA |
| | KNMASHPVSLHAVG | TACAGTGGTCATTACACTTAAGAACATGGCTTCCCATCCTGTC |
| | VSYWKASEGAEYDD | AGTCTTCATGCTGTTGGTGTATCCTACTGGAAAGCTTCTGAGG |
| | QTSQREKEDDKVFPG | GAGCTGAATATGATGATCAGACCAGTCAAAGGGAGAAAGAAG |
| | GSHTYVWQVLKENG | ATGATAAAGTCTTCCCTGGTGGAAGCCATACATATGTCTGGCA |
| | PMASDPLCLTYSYLS | GGTCCTGAAAGAGAATGGTCCAATGGCCTCTGACCCACTGTGC |
| | HVDLVKDLNSGLIGA | CTTACCTACTCATATCTTTCTCATGTGGACCTGGTAAAAGACTT |
| | LLVCREGSLAKEKTQ | GAATTCAGGCCTCATTGGAGCCCTACTAGTATGTAGAGAAGGG |
| | TLHKFILLFAVFDEGK | AGTCTGGCCAAGGAAAAGACACAGACCTTGCACAAATTTATA |
| | SWHSETKNSLMQDR | CTACTTTTTGCTGTATTTGATGAAGGGAAAAGTTGGCACTCAG |
| | DAASARAWPKMHTV | AAACAAAGAACTCCTTGATGCAGGATAGGGATGCTGCATCTG |
| | NGYVNRSLPGLIGCH | CTCGGGCCTGGCCTAAAATGCACACAGTCAATGGTTATGTAAA |
| | RKSVYWHVIGMGTT | CAGGTCTCTGCCAGGTCTGATTGGATGCCACAGGAAATCAGTC |
| | PEVHSIFLEGHTFLVR | TATTGGCATGTGATTGGAATGGGCACCACTCCTGAAGTGCACT |
| | NHRQASLEISPITFLT | CAATATTCCTCGAAGGTCACACATTTCTTGTGAGGAACCATCG |
| | AQTLLMDLGQFLLFC | CCAGGCTAGCTTGGAAATCTCGCCAATAACTTTCCTTACTGCT |
| | HISSHQHDGMEAYVK | CAAACACTCTTGATGGACCTTGGACAGTTTCTACTGTTTTGTCA |
| | VDSCPEEPQLRMKNN | TATCTCTTCCCACCAACATGATGGCATGGAAGCTTATGTCAAA |
| | EEAEDYDDDLTDSEM | GTAGACAGCTGTCCAGAGGAACCCCAACTACGAATGAAAAAT |
| | DVVRFDDDNSPSFIQI | AATGAAGAAGCGGAAGACTATGATGATGATCTTACTGATTCTG |
| | RSVAKKHPKTWVHYI | AAATGGATGTGGTCAGGTTTGATGATGACAACTCTCCTTCCTT |
| | AAEEEDWDYAPLVL | TATCCAAATTCGCTCAGTTGCCAAGAAGCATCCTAAAACTTGG |
| | APDDRSYKSQYLNNG | GTACATTACATTGCTGCTGAAGAGGAGGACTGGGACTATGCTC |
| | PQRIGRKYKKVRFMA | CCTTAGTCCTCGCCCCCGATGACAGAAGTTATAAAAGTCAATA |
| | YTDETFKTREAIQHES | TTTGAACAATGGCCCTCAGCGGATTGGTAGGAAGTACAAAAA |
| | GILGPLLYGEVGDTL | AGTCCGATTTATGGCATACACAGATGAAACCTTTAAGACTCGT |
| | LIIFKNQASRPYNIYP | GAAGCTATTCAGCATGAATCAGGAATCTTGGGACCTTTACTTT |
| | HGITDVRPLYSRRLPK | ATGGGGAAGTTGGAGACACACTGTTGATTATATTTAAGAATCA |
| | GVKHLKDFPILPGEIF | AGCAAGCAGACCATATAACATCTACCCTCACGGAATCACTGAT |
| | KYKWTVTVEDGPTK | GTCCGTCCTTTGTATTCAAGGAGATTACCAAAAGGTGTAAAAC |
| | SDPRCLTRYYSSFVN | ATTTGAAGGATTTTCCAATTCTGCCAGGAGAAATATTCAAATA |
| | MERDLASGLIGPLLIC | TAAATGGACAGTGACTGTAGAAGATGGGCCAACTAAATCAGA |
| | YKESVDQRGNQIMSD | TCCTCGGTGCCTGACCCGCTATTACTCTAGTTTCGTTAATATGG |
| | KRNVILFSVFDENRS | AGAGAGATCTAGCTTCAGGACTCATTGGCCCTCTCCTCATCTG |
| | WYLTENIQRFLPNPA | CTACAAAGAATCTGTAGATCAAAGAGGAAACCAGATAATGTC |
| | GVQLEDPEFQASNIM | AGACAAGAGGAATGTCATCCTGTTTTCTGTATTTGATGAGAAC |
| | HSINGYVFDSLQLSV | CGAAGCTGGTACCTCACAGAGAATATACAACGCTTTCTCCCCA |
| | CLHEVAYWYILSIGA | ATCCAGCTGGAGTGCAGCTTGAGGATCCAGAGTTCCAAGCCTC |
| | QTDFLSVFFSGYTFK | CAACATCATGCACAGCATCAATGGCTATGTTTTTGATAGTTTG |
| | HKMVYEDTLTLFPFS | CAGTTGTCAGTTTGTTTGCATGAGGTGGCATACTGGTACATTCT |
| | GETVFMSMENPGLWI | AAGCATTGGAGCACAGACTGACTTCCTTTCTGTCTTCTTCTCTG |
| | LGCHNSDFRNRGMT | GATATACCTTCAAACACAAAATGGTCTATGAAGACACACTCAC |
| | ALLKVSSCDKNTGDY | CCTATTCCCATTCTCAGGAGAAACTGTCTTCATGTCGATGGAA |
| | YEDSYEDISAYLLSK | AACCCAGGTCTATGGATTCTGGGGTGCCACAACTCAGACTTTC |
| | NNAIEPRSFSQNPPVL | GGAACAGAGGCATGACCGCCTTACTGAAGGTTTCTAGTTGTGA |
| | KRHQREITRTTLQSD | CAAGAACACTGGTGATTATTACGAGGACAGTTATGAAGATATT |
| | QEEIDYDDTISVEMK | TCAGCATACTTGCTGAGTAAAAACAATGCCATTGAACCAAGA |
| | KEDFDIYDEDENQSP | AGCTTCTCTCAAAACCCACCAGTCTTGAAACGCCATCAACGGG |
| | RSFQKKTRHYFIAAV | AAATAACTCGTACTACTCTTCAGTCAGATCAAGAGGAAATCGA |
| | ERLWDYGMSSSPHVL | TTATGATGATACCATATCAGTTGAAATGAAGAAGGAAGATTTT |
| | RNRAQSGSVPQFKKV | GACATTTATGATGAGGATGAAAATCAGAGCCCCCGCAGCTTTC |
| | VFQEFTDGSFTQPLY | AAAAGAAAACACGACACTATTTTATTGCTGCAGTGGAGAGGC |
| | RGELNEHLGLLGPYI | TCTGGGATTATGGGATGAGTAGCTCCCCACATGTTCTAAGAAA |
| | RAEVEDNIMVTFRNQ | CAGGGCTCAGAGTGGCAGTGTCCCTCAGTTCAAGAAAGTTGTT |
| | ASRPYSFYSSLISYEE | TTCCAGGAATTTACTGATGGCTCCTTTACTCAGCCCTTATACCG |
| | DQRQGAEPRKNFVKP | TGGAGAACTAAATGAACATTTGGGACTCCTGGGGCCATATATA |
| | NETKTYFWKVQHHM | AGAGCAGAAGTTGAAGATAATATCATGGTAACTTTCAGAAAT |
| | APTKDEFDCKAWAY | CAGGCCTCTCGTCCCTATTCCTTCTATTCTAGCCTTATTTCTTAT |
| | FSDVDLEKDVHSGLI | GAGGAAGATCAGAGGCAAGGAGCAGAACCTAGAAAAAACTTT |
| | GPLLVCHTNTLNPAH | GTCAAGCCTAATGAAACCAAAACTTACTTTTGGAAAGTGCAAC |
| | GRQVTVQEFALFFTIF | ATCATATGGCACCCACTAAAGATGAGTTTGACTGCAAAGCCTG |
| | DETKSWYFTENMER | GGCTTATTTCTCTGATGTTGACCTGGAAAAAGATGTGCACTCA |
| | NCRAPCNIQMEDPTF | GGCCTGATTGGACCCCTTCTGGTCTGCCACACTAACACACTGA |
| | KENYRFHAINGYIMD | ACCCTGCTCATGGGAGACAAGTGACAGTACAGGAATTTGCTCT |
| | TLPGLVMAQDQRIR | GTTTTTCACCATCTTTGATGAGACCAAAAGCTGGTACTTCACT |
| | WYLLSMGSNENIHSI | GAAAATATGGAAAGAAACTGCAGGGCTCCCTGCAATATCCAG |
| | HFSGHVFTVRKKEEY | ATGGAAGATCCCACTTTTAAAGAGAATTATCGCTTCCATGCAA |
| | KMALYNLYPGVFET | TCAATGGCTACATAATGGATACACTACCTGGCTTAGTAATGGC |
| | VEMLPSKAGIWRVEC | TCAGGATCAAAGGATTCGATGGTATCTGCTCAGCATGGGCAGC |
| | LIGEHLHAGMSTLFL | AATGAAAACATCCATTCTATTCATTTCAGTGGACATGTGTTCA |
| | VYSNKCQTPLGMAS | CTGTACGAAAAAAAGAGGAGTATAAAATGGCACTGTACAATC |
| | GHIRDFQITASGQYG | TCTATCCAGGTGTTTTTGAGACAGTGGAAATGTTACCATCCAA |
| | QWAPKLARLHYSGSI | AGCTGGAATTTGGCGGGTGGAATGCCTTATTGGCGAGCATCTA |
| | NAWSTKEPFSWIKVD | CATGCTGGGATGAGCACACTTTTTCTGGTGTACAGCAATAAGT |
| | LLAPMIIHGIKTQGAR | GTCAGACTCCCCTGGGAATGGCTTCTGGACACATTAGAGATTT |
| | QKFSSLYISQFIIMYSL | TCAGATTACAGCTTCAGGACAATATGGACAGTGGGCCCCAAA |
| | DGKKWQTYRGNSTG | GCTGGCCAGACTTCATTATTCCGGATCAATCAATGCCTGGAGC |
| | TLMVFFGNVDSSGIK | ACCAAGGAGCCCTTTTCTTGGATCAAGGTGGATCTGTTGGCAC |
| | HNIFNPPIIARYIRLHP | CAATGATTATTCACGGCATCAAGACCCAGGGTGCCCGTCAGAA |
| | THYSIRSTLRMELMG | GTTCTCCAGCCTCTACATCTCTCAGTTTATCATCATGTATAGTC |
| | CDLNSCSMPLGMESK | TTGATGGGAAGAAGTGGCAGACTTATCGAGGAAATTCCACTG |
| | AISDAGAPGSPAGSPT | GAACCTTAATGGTCTTCTTTGGCAATGTGGATTCATCTGGGAT |
| | STEEGTSESATPESGP | AAAACACAATATTTTTAACCCTCCAATTATTGCTCGATACATC |
| | GSEPATSGSETPASSQ | CGTTTGCACCCAACTCATTATAGCATTCGCAGCACTCTTCGCAT |
| | ITASSYFTNMFATWS | GGAGTTGATGGGCTGTGATTTAAATAGTTGCAGCATGCCATTG |
| | PSKARLHLQGRSNA | GGAATGGAGAGTAAAGCAATATCAGATGCAGGCGCGCCAGGT |
| | WRPQVNNPKEWLQV | TCTCCTGCTGGCTCCCCCACCTCAACAGAAGAGGGGACAAGCG |
| | DFQKTMKVTGVTTQ | AAAGCGCTACGCCTGAGAGTGGCCCTGGCTCTGAGCCAGCCA |
| | GVKSLLTSMYVKEFL | CCTCCGGCTCTGAAACCCCTGCCTCGAGCCAGATTACTGCTTC |
| | ISSSQDGHQWTLFFQ | ATCCTACTTTACCAATATGTTTGCCACCTGGTCTCCTTCAAAAG |
| | NGKVKVFQGNQDSF | CTCGACTTCACCTCCAAGGGAGGAGTAATGCCTGGAGACCTCA |
| | TPVVNSLDPPLLTRYL | GGTGAATAATCCAAAAGAGTGGCTGCAAGTGGACTTCCAGAA |
| | RIHPQSWVHQIALRM | GACAATGAAAGTCACAGGAGTAACTACTCAGGGAGTAAAATC |
| | EVLGCEAQDLYGAGS | TCTGCTTACCAGCATGTATGTGAAGGAGTTCCTCATCTCCAGC |
| | PGAETAEQKLISEEDL | AGTCAAGATGGCCATCAGTGGACTCTCTTTTTTCAGAATGGCA |
| | SPATG | AAGTAAAGGTTTTTCAGGGAAATCAAGACTCCTTCACACCTGT |
| | | GGTGAACTCTCTAGACCCACCGTTACTGACTCGCTACCTTCGA |
| | | ATTCACCCCCAGAGTTGGGTGCACCAGATTGCCCTGAGGATGG |
| | | AGGTTCTGGGCTGCGAGGCACAGGACCTCTACGGCGCCGGAT |
| | | CACCTGGGGCCGAAACGGCCGAACAAAAACTCATCTCAGAAG |
| | | AGGATCTGTCACCTGCAACCGGTTGA |
| pBC0182 | MQIELSTCFFLCLLRF | ATGCAAATAGAGCTCTCCACCTGCTTCTTTCTGTGCCTTTTGCG |
| | CFSATRRYYLGAVEL | ATTCTGCTTTAGTGCCACCAGAAGATACTACCTGGGTGCAGTG |
| | SWDYMQSDLGELPV | GAACTGTCATGGGACTATATGCAAAGTGATCTCGGTGAGCTGC |
| | DARFPPRVPKSFPFNT | CTGTGGACGCAAGATTTCCTCCTAGAGTGCCAAAATCTTTTCC |
| | SVVYKKTLFVEFTDH | ATTCAACACCTCAGTCGTGTACAAAAAGACTCTGTTTGTAGAA |
| | LFNIAKPRPPWMGLL | TTCACGGATCACCTTTTCAACATCGCTAAGCCAAGGCCACCCT |
| | GPTIQAEVYDTVVITL | GGATGGGTCTGCTAGGTCCTACCATCCAGGCTGAGGTTTATGA |
| | KNMASHPVSLHAVG | TACAGTGGTCATTACACTTAAGAACATGGCTTCCCATCCTGTC |
| | VSYWKASEGAEYDD | AGTCTTCATGCTGTTGGTGTATCCTACTGGAAAGCTTCTGAGG |
| | QTSQREKEDDKVFPG | GAGCTGAATATGATGATCAGACCAGTCAAAGGGAGAAAGAAG |
| | GSHTYVWQVLKENG | ATGATAAAGTCTTCCCTGGTGGAAGCCATACATATGTCTGGCA |
| | PMASDPLCLTYSYLS | GGTCCTGAAAGAGAATGGTCCAATGGCCTCTGACCCACTGTGC |
| | HVDLVKDLNSGLIGA | CTTACCTACTCATATCTTTCTCATGTGGACCTGGTAAAAGACTT |
| | LLVCREGSLAKEKTQ | GAATTCAGGCCTCATTGGAGCCCTACTAGTATGTAGAGAAGGG |
| | TLHKFILLFAVFDEGK | AGTCTGGCCAAGGAAAAGACACAGACCTTGCACAAATTTATA |
| | SWHSETKNSLMQDR | CTACTTTTTGCTGTATTTGATGAAGGGAAAAGTTGGCACTCAG |
| | DAASARAWPKMHTV | AAACAAAGAACTCCTTGATGCAGGATAGGGATGCTGCATCTG |
| | NGYVNRSLPGLIGCH | CTCGGGCCTGGCCTAAAATGCACACAGTCAATGGTTATGTAAA |
| | RKSVYWHVIGMGTT | CAGGTCTCTGCCAGGTCTGATTGGATGCCACAGGAAATCAGTC |
| | PEVHSIFLEGHTFLVR | TATTGGCATGTGATTGGAATGGGCACCACTCCTGAAGTGCACT |
| | NHRQASLEISPITFLT | CAATATTCCTCGAAGGTCACACATTTCTTGTGAGGAACCATCG |
| | AQTLLMDLGQFLLFC | CCAGGCTAGCTTGGAAATCTCGCCAATAACTTTCCTTACTGCT |
| | HISSHQHDGMEAYVK | CAAACACTCTTGATGGACCTTGGACAGTTTCTACTGTTTTGTCA |
| | VDSCPEEPQLRMKNN | TATCTCTTCCCACCAACATGATGGCATGGAAGCTTATGTCAAA |
| | EEAEDYDDDLTDSEM | GTAGACAGCTGTCCAGAGGAACCCCAACTACGAATGAAAAAT |
| | DVVRFDDDNSPSFIQI | AATGAAGAAGCGGAAGACTATGATGATGATCTTACTGATTCTG |
| | RSVAKKHPKTWVHYI | AAATGGATGTGGTCAGGTTTGATGATGACAACTCTCCTTCCTT |
| | AAEEEDWDYAPLVL | TATCCAAATTCGCTCAGTTGCCAAGAAGCATCCTAAAACTTGG |
| | APDDRSYKSQYLNNG | GTACATTACATTGCTGCTGAAGAGGAGGACTGGGACTATGCTC |
| | PQRIGRKYKKVRFMA | CCTTAGTCCTCGCCCCCGATGACAGAAGTTATAAAAGTCAATA |
| | YTDETFKTREAIQHES | TTTGAACAATGGCCCTCAGCGGATTGGTAGGAAGTACAAAAA |
| | GILGPLLYGEVGDTL | AGTCCGATTTATGGCATACACAGATGAAACCTTTAAGACTCGT |
| | LIIFKNQASRPYNIYP | GAAGCTATTCAGCATGAATCAGGAATCTTGGGACCTTTACTTT |
| | HGITDVRPLYSRRLPK | ATGGGGAAGTTGGAGACACACTGTTGATTATATTTAAGAATCA |
| | GVKHLKDFPILPGEIF | AGCAAGCAGACCATATAACATCTACCCTCACGGAATCACTGAT |
| | KYKWTVTVEDGPTK | GTCCGTCCTTTGTATTCAAGGAGATTACCAAAAGGTGTAAAAC |
| | SDPRCLTRYYSSFVN | ATTTGAAGGATTTTCCAATTCTGCCAGGAGAAATATTCAAATA |
| | MERDLASGLIGPLLIC | TAAATGGACAGTGACTGTAGAAGATGGGCCAACTAAATCAGA |
| | YKESVDQRGNQIMSD | TCCTCGGTGCCTGACCCGCTATTACTCTAGTTTCGTTAATATGG |
| | KRNVILFSVFDENRS | AGAGAGATCTAGCTTCAGGACTCATTGGCCCTCTCCTCATCTG |
| | WYLTENIQRFLPNPA | CTACAAAGAATCTGTAGATCAAAGAGGAAACCAGATAATGTC |
| | GVQLEDPEFQASNIM | AGACAAGAGGAATGTCATCCTGTTTTCTGTATTTGATGAGAAC |
| | HSINGYVFDSLQLSV | CGAAGCTGGTACCTCACAGAGAATATACAACGCTTTCTCCCCA |
| | CLHEVAYWYILSIGA | ATCCAGCTGGAGTGCAGCTTGAGGATCCAGAGTTCCAAGCCTC |
| | QTDFLSVFFSGYTFK | CAACATCATGCACAGCATCAATGGCTATGTTTTTGATAGTTTG |
| | HKMVYEDTLTLFPFS | CAGTTGTCAGTTTGTTTGCATGAGGTGGCATACTGGTACATTCT |
| | GETVFMSMENPGLWI | AAGCATTGGAGCACAGACTGACTTCCTTTCTGTCTTCTTCTCTG |
| | LGCHNSDFRNRGMT | GATATACCTTCAAACACAAAATGGTCTATGAAGACACACTCAC |
| | ALLKVSSCDKNTGDY | CCTATTCCCATTCTCAGGAGAAACTGTCTTCATGTCGATGGAA |
| | YEDSYEDISAYLLSK | AACCCAGGTCTATGGATTCTGGGGTGCCACAACTCAGACTTTC |
| | NNAIEPRSFSQNPPVL | GGAACAGAGGCATGACCGCCTTACTGAAGGTTTCTAGTTGTGA |
| | KRHQREITRTTLQSD | CAAGAACACTGGTGATTATTACGAGGACAGTTATGAAGATATT |
| | QEEIDYDDTISVEMK | TCAGCATACTTGCTGAGTAAAAACAATGCCATTGAACCAAGA |
| | KEDFDIYDEDENQSP | AGCTTCTCTCAAAACCCACCAGTCTTGAAACGCCATCAACGGG |
| | RSFQKKTRHYFIAAV | AAATAACTCGTACTACTCTTCAGTCAGATCAAGAGGAAATCGA |
| | ERLWDYGMSSSPHVL | TTATGATGATACCATATCAGTTGAAATGAAGAAGGAAGATTTT |
| | RNRAQSGSVPQFKKV | GACATTTATGATGAGGATGAAAATCAGAGCCCCCGCAGCTTTC |
| | VFQEFTDGSFTQPLY | AAAAGAAAACACGACACTATTTTATTGCTGCAGTGGAGAGGC |
| | RGELNEHLGLLGPYI | TCTGGGATTATGGGATGAGTAGCTCCCCACATGTTCTAAGAAA |
| | RAEVEDNIMVTFRNQ | CAGGGCTCAGAGTGGCAGTGTCCCTCAGTTCAAGAAAGTTGTT |
| | ASRPYSFYSSLISYEE | TTCCAGGAATTTACTGATGGCTCCTTTACTCAGCCCTTATACCG |
| | DQRQGAEPRKNFVKP | TGGAGAACTAAATGAACATTTGGGACTCCTGGGGCCATATATA |
| | NETKTYFWKVQHHM | AGAGCAGAAGTTGAAGATAATATCATGGTAACTTTCAGAAAT |
| | APTKDEFDCKAWAY | CAGGCCTCTCGTCCCTATTCCTTCTATTCTAGCCTTATTTCTTAT |
| | FSDVDLEKDVHSGLI | GAGGAAGATCAGAGGCAAGGAGCAGAACCTAGAAAAAACTTT |
| | GPLLVCHTNTLNPAH | GTCAAGCCTAATGAAACCAAAACTTACTTTTGGAAAGTGCAAC |
| | GRQVTVQEFALFFTIF | ATCATATGGCACCCACTAAAGATGAGTTTGACTGCAAAGCCTG |
| | DETKSWYFTENMER | GGCTTATTTCTCTGATGTTGACCTGGAAAAAGATGTGCACTCA |
| | NCRAPCNIQMEDPTF | GGCCTGATTGGACCCCTTCTGGTCTGCCACACTAACACACTGA |
| | KENYRFHAINGYIMD | ACCCTGCTCATGGGAGACAAGTGACAGTACAGGAATTTGCTCT |
| | TLPGLVMAQDQRIR | GTTTTTCACCATCTTTGATGAGACCAAAAGCTGGTACTTCACT |
| | WYLLSMGSNENIHSI | GAAAATATGGAAAGAAACTGCAGGGCTCCCTGCAATATCCAG |
| | HFSGHVFTVRKKEEY | ATGGAAGATCCCACTTTTAAAGAGAATTATCGCTTCCATGCAA |
| | KMALYNLYPGVFET | TCAATGGCTACATAATGGATACACTACCTGGCTTAGTAATGGC |
| | VEMLPSKAGIWRVEC | TCAGGATCAAAGGATTCGATGGTATCTGCTCAGCATGGGCAGC |
| | LIGEHLHAGMSTLFL | AATGAAAACATCCATTCTATTCATTTCAGTGGACATGTGTTCA |
| | VYSNKCQTPLGMAS | CTGTACGAAAAAAAGAGGAGTATAAAATGGCACTGTACAATC |
| | GHIRDFQITASGQYG | TCTATCCAGGTGTTTTTGAGACAGTGGAAATGTTACCATCCAA |
| | QWAPKLARLHYSGSI | AGCTGGAATTTGGCGGGTGGAATGCCTTATTGGCGAGCATCTA |
| | NAWSTKEPFSWIKVD | CATGCTGGGATGAGCACACTTTTTCTGGTGTACAGCAATAAGT |
| | LLAPMIIHGIKTQGAR | GTCAGACTCCCCTGGGAATGGCTTCTGGACACATTAGAGATTT |
| | QKFSSLYISQFIIMYSL | TCAGATTACAGCTTCAGGACAATATGGACAGTGGGCCCCAAA |
| | DGKKWQTYRGNSTG | GCTGGCCAGACTTCATTATTCCGGATCAATCAATGCCTGGAGC |
| | TLMVFFGNVDSSGIK | ACCAAGGAGCCCTTTTCTTGGATCAAGGTGGATCTGTTGGCAC |
| | HNIFNPPIIARYIRLHP | CAATGATTATTCACGGCATCAAGACCCAGGGTGCCCGTCAGAA |
| | THYSIRSTLRMELMG | GTTCTCCAGCCTCTACATCTCTCAGTTTATCATCATGTATAGTC |
| | CDLNSCSMPLGMESK | TTGATGGGAAGAAGTGGCAGACTTATCGAGGAAATTCCACTG |
| | AISDAQITASSYFTNM | GAACCTTAATGGTCTTCTTTGGCAATGTGGATTCATCTGGGAT |
| | FATWSPSKARLHLQG | AAAACACAATATTTTTAACCCTCCAATTATTGCTCGATACATC |
| | RSNAWRPQVNNPKG | CGTTTGCACCCAACTCATTATAGCATTCGCAGCACTCTTCGCAT |
| | APGSPAGSPTSTEEGT | GGAGTTGATGGGCTGTGATTTAAATAGTTGCAGCATGCCATTG |
| | SESATPESGPGSEPAT | GGAATGGAGAGTAAAGCAATATCAGATGCACAGATTACTGCT |
| | SGSETPASSEWLQVD | TCATCCTACTTTACCAATATGTTTGCCACCTGGTCTCCTTCAAA |
| | FQKTMKVTGVTTQG | AGCTCGACTTCACCTCCAAGGGAGGAGTAATGCCTGGAGACCT |
| | VKSLLTSMYVKEFLIS | CAGGTGAATAATCCAAAAGGCGCGCCAGGTTCTCCTGCTGGCT |
| | SSQDGHQWTLFFQNG | CCCCCACCTCAACAGAAGAGGGGACAAGCGAAAGCGCTACGC |
| | KVKVFQGNQDSFTPV | CTGAGAGTGGCCCTGGCTCTGAGCCAGCCACCTCCGGCTCTGA |
| | VNSLDPPLLTRYLRIH | AACCCCTGCCTCGAGCGAGTGGCTGCAAGTGGACTTCCAGAA |
| | PQSWVHQIALRMEVL | GACAATGAAAGTCACAGGAGTAACTACTCAGGGAGTAAAATC |
| | GCEAQDLYGAGSPG | TCTGCTTACCAGCATGTATGTGAAGGAGTTCCTCATCTCCAGC |
| | AETAEQKLISEEDLSP | AGTCAAGATGGCCATCAGTGGACTCTCTTTTTTCAGAATGGCA |
| | ATG | AAGTAAAGGTTTTTCAGGGAAATCAAGACTCCTTCACACCTGT |
| | | GGTGAACTCTCTAGACCCACCGTTACTGACTCGCTACCTTCGA |
| | | ATTCACCCCCAGAGTTGGGTGCACCAGATTGCCCTGAGGATGG |
| | | AGGTTCTGGGCTGCGAGGCACAGGACCTCTACGGCGCCGGAT |
| | | CACCTGGGGCCGAAACGGCCGAACAAAAACTCATCTCAGAAG |
| | | AGGATCTGTCACCTGCAACCGGTTGA |
| pBC0144 | MQIELSTCFFLCLLRF | ATGCAAATAGAGCTCTCCACCTGCTTCTTTCTGTGCCTTTTGCG |
| | CFSATRRYYLGAVEL | ATTCTGCTTTAGTGCCACCAGAAGATACTACCTGGGTGCAGTG |
| | SWDYMQSDLGELPV | GAACTGTCATGGGACTATATGCAAAGTGATCTCGGTGAGCTGC |
| | DARFPPRVPKSFPFNT | CTGTGGACGCAAGATTTCCTCCTAGAGTGCCAAAATCTTTTCC |
| | SVVYKKTLFVEFTDH | ATTCAACACCTCAGTCGTGTACAAAAAGACTCTGTTTGTAGAA |
| | LFNIAKPRPPWMGLL | TTCACGGATCACCTTTTCAACATCGCTAAGCCAAGGCCACCCT |
| | GPTIQAEVYDTVVITL | GGATGGGTCTGCTAGGTCCTACCATCCAGGCTGAGGTTTATGA |
| | KNMASHPVSLHAVG | TACAGTGGTCATTACACTTAAGAACATGGCTTCCCATCCTGTC |
| | VSYWKASEGAEYDD | AGTCTTCATGCTGTTGGTGTATCCTACTGGAAAGCTTCTGAGG |
| | QTSQREKEDDKVFPG | GAGCTGAATATGATGATCAGACCAGTCAAAGGGAGAAAGAAG |
| | GSHTYVWQVLKENG | ATGATAAAGTCTTCCCTGGTGGAAGCCATACATATGTCTGGCA |
| | PMASDPLCLTYSYLS | GGTCCTGAAAGAGAATGGTCCAATGGCCTCTGACCCACTGTGC |
| | HVDLVKDLNSGLIGA | CTTACCTACTCATATCTTTCTCATGTGGACCTGGTAAAAGACTT |
| | LLVCREGSLAKEKTQ | GAATTCAGGCCTCATTGGAGCCCTACTAGTATGTAGAGAAGGG |
| | TLHKFILLFAVFDEGK | AGTCTGGCCAAGGAAAAGACACAGACCTTGCACAAATTTATA |
| | SWHSETKNSLMQDR | CTACTTTTTGCTGTATTTGATGAAGGGAAAAGTTGGCACTCAG |
| | DAASARAWPKMHTV | AAACAAAGAACTCCTTGATGCAGGATAGGGATGCTGCATCTG |
| | NGYVNRSLPGLIGCH | CTCGGGCCTGGCCTAAAATGCACACAGTCAATGGTTATGTAAA |
| | RKSVYWHVIGMGTT | CAGGTCTCTGCCAGGTCTGATTGGATGCCACAGGAAATCAGTC |
| | PEVHSIFLEGHTFLVR | TATTGGCATGTGATTGGAATGGGCACCACTCCTGAAGTGCACT |
| | NHRQASLEISPITFLT | CAATATTCCTCGAAGGTCACACATTTCTTGTGAGGAACCATCG |
| | AQTLLMDLGQFLLFC | CCAGGCTAGCTTGGAAATCTCGCCAATAACTTTCCTTACTGCT |
| | HISSHQHDGMEAYVK | CAAACACTCTTGATGGACCTTGGACAGTTTCTACTGTTTTGTCA |
| | VDSCPEEPQLRMKNN | TATCTCTTCCCACCAACATGATGGCATGGAAGCTTATGTCAAA |
| | EEAEDYDDDLTDSEM | GTAGACAGCTGTCCAGAGGAACCCCAACTACGAATGAAAAAT |
| | DVVRFDDDNSPSFIQI | AATGAAGAAGCGGAAGACTATGATGATGATCTTACTGATTCTG |
| | RSVAKKHPKTWVHYI | AAATGGATGTGGTCAGGTTTGATGATGACAACTCTCCTTCCTT |
| | AAEEEDWDYAPLVL | TATCCAAATTCGCTCAGTTGCCAAGAAGCATCCTAAAACTTGG |
| | APDDRSYKSQYLNNG | GTACATTACATTGCTGCTGAAGAGGAGGACTGGGACTATGCTC |
| | PQRIGRKYKKVRFMA | CCTTAGTCCTCGCCCCCGATGACAGAAGTTATAAAAGTCAATA |
| | YTDETFKTREAIQHES | TTTGAACAATGGCCCTCAGCGGATTGGTAGGAAGTACAAAAA |
| | GILGPLLYGEVGDTL | AGTCCGATTTATGGCATACACAGATGAAACCTTTAAGACTCGT |
| | LIIFKNQASRPYNIYP | GAAGCTATTCAGCATGAATCAGGAATCTTGGGACCTTTACTTT |
| | HGITDVRPLYSRRLPK | ATGGGGAAGTTGGAGACACACTGTTGATTATATTTAAGAATCA |
| | GVKHLKDFPILPGEIF | AGCAAGCAGACCATATAACATCTACCCTCACGGAATCACTGAT |
| | KYKWTVTVEDGPTK | GTCCGTCCTTTGTATTCAAGGAGATTACCAAAAGGTGTAAAAC |
| | SDPRCLTRYYSSFVN | ATTTGAAGGATTTTCCAATTCTGCCAGGAGAAATATTCAAATA |
| | MERDLASGLIGPLLIC | TAAATGGACAGTGACTGTAGAAGATGGGCCAACTAAATCAGA |
| | YKESVDQRGNQIMSD | TCCTCGGTGCCTGACCCGCTATTACTCTAGTTTCGTTAATATGG |
| | KRNVILFSVFDENRS | AGAGAGATCTAGCTTCAGGACTCATTGGCCCTCTCCTCATCTG |
| | WYLTENIQRFLPNPA | CTACAAAGAATCTGTAGATCAAAGAGGAAACCAGATAATGTC |
| | GVQLEDPEFQASNIM | AGACAAGAGGAATGTCATCCTGTTTTCTGTATTTGATGAGAAC |
| | HSINGYVFDSLQLSV | CGAAGCTGGTACCTCACAGAGAATATACAACGCTTTCTCCCCA |
| | CLHEVAYWYILSIGA | ATCCAGCTGGAGTGCAGCTTGAGGATCCAGAGTTCCAAGCCTC |
| | QTDFLSVFFSGYTFK | CAACATCATGCACAGCATCAATGGCTATGTTTTTGATAGTTTG |
| | HKMVYEDTLTLFPFS | CAGTTGTCAGTTTGTTTGCATGAGGTGGCATACTGGTACATTCT |
| | GETVFMSMENPGLWI | AAGCATTGGAGCACAGACTGACTTCCTTTCTGTCTTCTTCTCTG |
| | LGCHNSDFRNRGMT | GATATACCTTCAAACACAAAATGGTCTATGAAGACACACTCAC |
| | ALLKVSSCDKNTGDY | CCTATTCCCATTCTCAGGAGAAACTGTCTTCATGTCGATGGAA |
| | YEDSYEDISAYLLSK | AACCCAGGTCTATGGATTCTGGGGTGCCACAACTCAGACTTTC |
| | NNAIEPRSFSQNPPVL | GGAACAGAGGCATGACCGCCTTACTGAAGGTTTCTAGTTGTGA |
| | KRHQREITRTTLQSD | CAAGAACACTGGTGATTATTACGAGGACAGTTATGAAGATATT |
| | QEEIDYDDTISVEMK | TCAGCATACTTGCTGAGTAAAAACAATGCCATTGAACCAAGA |
| | KEDFDIYDEDENQSP | AGCTTCTCTCAAAACCCACCAGTCTTGAAACGCCATCAACGGG |
| | RSFQKKTRHYFIAAV | AAATAACTCGTACTACTCTTCAGTCAGATCAAGAGGAAATCGA |
| | ERLWDYGMSSSPHVL | TTATGATGATACCATATCAGTTGAAATGAAGAAGGAAGATTTT |
| | RNRAQSGSVPQFKKV | GACATTTATGATGAGGATGAAAATCAGAGCCCCCGCAGCTTTC |
| | VFQEFTDGSFTQPLY | AAAAGAAAACACGACACTATTTTATTGCTGCAGTGGAGAGGC |
| | RGELNEHLGLLGPYI | TCTGGGATTATGGGATGAGTAGCTCCCCACATGTTCTAAGAAA |
| | RAEVEDNIMVTFRNQ | CAGGGCTCAGAGTGGCAGTGTCCCTCAGTTCAAGAAAGTTGTT |
| | ASRPYSFYSSLISYEE | TTCCAGGAATTTACTGATGGCTCCTTTACTCAGCCCTTATACCG |
| | DQRQGAEPRKNFVKP | TGGAGAACTAAATGAACATTTGGGACTCCTGGGGCCATATATA |
| | NETKTYFWKVQHHM | AGAGCAGAAGTTGAAGATAATATCATGGTAACTTTCAGAAAT |
| | APTKDEFDCKAWAY | CAGGCCTCTCGTCCCTATTCCTTCTATTCTAGCCTTATTTCTTAT |
| | FSDVDLEKDVHSGLI | GAGGAAGATCAGAGGCAAGGAGCAGAACCTAGAAAAAACTTT |
| | GPLLVCHTNTLNPAH | GTCAAGCCTAATGAAACCAAAACTTACTTTTGGAAAGTGCAAC |
| | GRQVTVQEFALFFTIF | ATCATATGGCACCCACTAAAGATGAGTTTGACTGCAAAGCCTG |
| | DETKSWYFTENMER | GGCTTATTTCTCTGATGTTGACCTGGAAAAAGATGTGCACTCA |
| | NCRAPCNIQMEDPTF | GGCCTGATTGGACCCCTTCTGGTCTGCCACACTAACACACTGA |
| | KENYRFHAINGYIMD | ACCCTGCTCATGGGAGACAAGTGACAGTACAGGAATTTGCTCT |
| | TLPGLVMAQDQRIR | GTTTTTCACCATCTTTGATGAGACCAAAAGCTGGTACTTCACT |
| | WYLLSMGSNENIHSI | GAAAATATGGAAAGAAACTGCAGGGCTCCCTGCAATATCCAG |
| | HFSGHVFTVRKKEEY | ATGGAAGATCCCACTTTTAAAGAGAATTATCGCTTCCATGCAA |
| | KMALYNLYPGVFET | TCAATGGCTACATAATGGATACACTACCTGGCTTAGTAATGGC |
| | VEMLPSKAGIWRVEC | TCAGGATCAAAGGATTCGATGGTATCTGCTCAGCATGGGCAGC |
| | LIGEHLHAGMSTLFL | AATGAAAACATCCATTCTATTCATTTCAGTGGACATGTGTTCA |
| | VYSNKCQTPLGMAS | CTGTACGAAAAAAAGAGGAGTATAAAATGGCACTGTACAATC |
| | GHIRDFQITASGQYG | TCTATCCAGGTGTTTTTGAGACAGTGGAAATGTTACCATCCAA |
| | QWAPKLARLHYSGSI | AGCTGGAATTTGGCGGGTGGAATGCCTTATTGGCGAGCATCTA |
| | NAWSTKEPFSWIKVD | CATGCTGGGATGAGCACACTTTTTCTGGTGTACAGCAATAAGT |
| | LLAPMIIHGIKTQGAR | GTCAGACTCCCCTGGGAATGGCTTCTGGACACATTAGAGATTT |
| | QKFSSLYISQFIIMYSL | TCAGATTACAGCTTCAGGACAATATGGACAGTGGGCCCCAAA |
| | DGKKWQTYRGNSTG | GCTGGCCAGACTTCATTATTCCGGATCAATCAATGCCTGGAGC |
| | TLMVFFGNVDSSGIK | ACCAAGGAGCCCTTTTCTTGGATCAAGGTGGATCTGTTGGCAC |
| | HNIFNPPIIARYIRLHP | CAATGATTATTCACGGCATCAAGACCCAGGGTGCCCGTCAGAA |
| | THYSIRSTLRMELMG | GTTCTCCAGCCTCTACATCTCTCAGTTTATCATCATGTATAGTC |
| | CDLNSCSMPLGMESK | TTGATGGGAAGAAGTGGCAGACTTATCGAGGAAATTCCACTG |
| | AISDAQITASSYFTNM | GAACCTTAATGGTCTTCTTTGGCAATGTGGATTCATCTGGGAT |
| | FATWSPSKARLHLQG | AAAACACAATATTTTTAACCCTCCAATTATTGCTCGATACATC |
| | RSNAWRPQVNNPKE | CGTTTGCACCCAACTCATTATAGCATTCGCAGCACTCTTCGCAT |
| | WLQVDFQKTMKVTG | GGAGTTGATGGGCTGTGATTTAAATAGTTGCAGCATGCCATTG |
| | VTTQGVKSLLTSMYV | GGAATGGAGAGTAAAGCAATATCAGATGCACAGATTACTGCT |
| | KEFLISSSQDGHQWT | TCATCCTACTTTACCAATATGTTTGCCACCTGGTCTCCTTCAAA |
| | LFFQNGAPGSPAGSPT | AGCTCGACTTCACCTCCAAGGGAGGAGTAATGCCTGGAGACCT |
| | STEEGTSESATPESGP | CAGGTGAATAATCCAAAAGAGTGGCTGCAAGTGGACTTCCAG |
| | GSEPATSGSETPASSG | AAGACAATGAAAGTCACAGGAGTAACTACTCAGGGAGTAAAA |
| | KVKVFQGNQDSFTPV | TCTCTGCTTACCAGCATGTATGTGAAGGAGTTCCTCATCTCCA |
| | VNSLDPPLLTRYLRIH | GCAGTCAAGATGGCCATCAGTGGACTCTCTTTTTTCAGAATGG |
| | PQSWVHQIALRMEVL | CGCGCCAGGTTCTCCTGCTGGCTCCCCCACCTCAACAGAAGAG |
| | GCEAQDLYGAGSPG | GGGACAAGCGAAAGCGCTACGCCTGAGAGTGGCCCTGGCTCT |
| | AETAEQKLISEEDLSP | GAGCCAGCCACCTCCGGCTCTGAAACCCCTGCCTCGAGCGGCA |
| | ATG | AAGTAAAGGTTTTTCAGGGAAATCAAGACTCCTTCACACCTGT |
| | | GGTGAACTCTCTAGACCCACCGTTACTGACTCGCTACCTTCGA |
| | | ATTCACCCCCAGAGTTGGGTGCACCAGATTGCCCTGAGGATGG |
| | | AGGTTCTGGGCTGCGAGGCACAGGACCTCTACGGCGCCGGAT |
| | | CACCTGGGGCCGAAACGGCCGAACAAAAACTCATCTCAGAAG |
| | | AGGATCTGTCACCTGCAACCGGTTGA |
| pBC0145 | MQIELSTCFFLCLLRF | ATGCAAATAGAGCTCTCCACCTGCTTCTTTCTGTGCCTTTTGCG |
| | CFSATRRYYLGAVEL | ATTCTGCTTTAGTGCCACCAGAAGATACTACCTGGGTGCAGTG |
| | SWDYMQSDLGELPV | GAACTGTCATGGGACTATATGCAAAGTGATCTCGGTGAGCTGC |
| | DARFPPRVPKSFPFNT | CTGTGGACGCAAGATTTCCTCCTAGAGTGCCAAAATCTTTTCC |
| | SVVYKKTLFVEFTDH | ATTCAACACCTCAGTCGTGTACAAAAAGACTCTGTTTGTAGAA |
| | LFNIAKPRPPWMGLL | TTCACGGATCACCTTTTCAACATCGCTAAGCCAAGGCCACCCT |
| | GPTIQAEVYDTVVITL | GGATGGGTCTGCTAGGTCCTACCATCCAGGCTGAGGTTTATGA |
| | KNMASHPVSLHAVG | TACAGTGGTCATTACACTTAAGAACATGGCTTCCCATCCTGTC |
| | VSYWKASEGAEYDD | AGTCTTCATGCTGTTGGTGTATCCTACTGGAAAGCTTCTGAGG |
| | QTSQREKEDDKVFPG | GAGCTGAATATGATGATCAGACCAGTCAAAGGGAGAAAGAAG |
| | GSHTYVWQVLKENG | ATGATAAAGTCTTCCCTGGTGGAAGCCATACATATGTCTGGCA |
| | PMASDPLCLTYSYLS | GGTCCTGAAAGAGAATGGTCCAATGGCCTCTGACCCACTGTGC |
| | HVDLVKDLNSGLIGA | CTTACCTACTCATATCTTTCTCATGTGGACCTGGTAAAAGACTT |
| | LLVCREGSLAKEKTQ | GAATTCAGGCCTCATTGGAGCCCTACTAGTATGTAGAGAAGGG |
| | TLHKFILLFAVFDEGK | AGTCTGGCCAAGGAAAAGACACAGACCTTGCACAAATTTATA |
| | SWHSETKNSLMQDR | CTACTTTTTGCTGTATTTGATGAAGGGAAAAGTTGGCACTCAG |
| | DAASARAWPKMHTV | AAACAAAGAACTCCTTGATGCAGGATAGGGATGCTGCATCTG |
| | NGYVNRSLPGLIGCH | CTCGGGCCTGGCCTAAAATGCACACAGTCAATGGTTATGTAAA |
| | RKSVYWHVIGMGTT | CAGGTCTCTGCCAGGTCTGATTGGATGCCACAGGAAATCAGTC |
| | PEVHSIFLEGHTFLVR | TATTGGCATGTGATTGGAATGGGCACCACTCCTGAAGTGCACT |
| | NHRQASLEISPITFLT | CAATATTCCTCGAAGGTCACACATTTCTTGTGAGGAACCATCG |
| | AQTLLMDLGQFLLFC | CCAGGCTAGCTTGGAAATCTCGCCAATAACTTTCCTTACTGCT |
| | HISSHQHDGMEAYVK | CAAACACTCTTGATGGACCTTGGACAGTTTCTACTGTTTTGTCA |
| | VDSCPEEPQLRMKNN | TATCTCTTCCCACCAACATGATGGCATGGAAGCTTATGTCAAA |
| | EEAEDYDDDLTDSEM | GTAGACAGCTGTCCAGAGGAACCCCAACTACGAATGAAAAAT |
| | DVVRFDDDNSPSFIQI | AATGAAGAAGCGGAAGACTATGATGATGATCTTACTGATTCTG |
| | RSVAKKHPKTWVHYI | AAATGGATGTGGTCAGGTTTGATGATGACAACTCTCCTTCCTT |
| | AAEEEDWDYAPLVL | TATCCAAATTCGCTCAGTTGCCAAGAAGCATCCTAAAACTTGG |
| | APDDRSYKSQYLNNG | GTACATTACATTGCTGCTGAAGAGGAGGACTGGGACTATGCTC |
| | PQRIGRKYKKVRFMA | CCTTAGTCCTCGCCCCCGATGACAGAAGTTATAAAAGTCAATA |
| | YTDETFKTREAIQHES | TTTGAACAATGGCCCTCAGCGGATTGGTAGGAAGTACAAAAA |
| | GILGPLLYGEVGDTL | AGTCCGATTTATGGCATACACAGATGAAACCTTTAAGACTCGT |
| | LIIFKNQASRPYNIYP | GAAGCTATTCAGCATGAATCAGGAATCTTGGGACCTTTACTTT |
| | HGITDVRPLYSRRLPK | ATGGGGAAGTTGGAGACACACTGTTGATTATATTTAAGAATCA |
| | GVKHLKDFPILPGEIF | AGCAAGCAGACCATATAACATCTACCCTCACGGAATCACTGAT |
| | KYKWTVTVEDGPTK | GTCCGTCCTTTGTATTCAAGGAGATTACCAAAAGGTGTAAAAC |
| | SDPRCLTRYYSSFVN | ATTTGAAGGATTTTCCAATTCTGCCAGGAGAAATATTCAAATA |
| | MERDLASGLIGPLLIC | TAAATGGACAGTGACTGTAGAAGATGGGCCAACTAAATCAGA |
| | YKESVDQRGNQIMSD | TCCTCGGTGCCTGACCCGCTATTACTCTAGTTTCGTTAATATGG |
| | KRNVILFSVFDENRS | AGAGAGATCTAGCTTCAGGACTCATTGGCCCTCTCCTCATCTG |
| | WYLTENIQRFLPNPA | CTACAAAGAATCTGTAGATCAAAGAGGAAACCAGATAATGTC |
| | GVQLEDPEFQASNIM | AGACAAGAGGAATGTCATCCTGTTTTCTGTATTTGATGAGAAC |
| | HSINGYVFDSLQLSV | CGAAGCTGGTACCTCACAGAGAATATACAACGCTTTCTCCCCA |
| | CLHEVAYWYILSIGA | ATCCAGCTGGAGTGCAGCTTGAGGATCCAGAGTTCCAAGCCTC |
| | QTDFLSVFFSGYTFK | CAACATCATGCACAGCATCAATGGCTATGTTTTTGATAGTTTG |
| | HKMVYEDTLTLFPFS | CAGTTGTCAGTTTGTTTGCATGAGGTGGCATACTGGTACATTCT |
| | GETVFMSMENPGLWI | AAGCATTGGAGCACAGACTGACTTCCTTTCTGTCTTCTTCTCTG |
| | LGCHNSDFRNRGMT | GATATACCTTCAAACACAAAATGGTCTATGAAGACACACTCAC |
| | ALLKVSSCDKNTGDY | CCTATTCCCATTCTCAGGAGAAACTGTCTTCATGTCGATGGAA |
| | YEDSYEDISAYLLSK | AACCCAGGTCTATGGATTCTGGGGTGCCACAACTCAGACTTTC |
| | NNAIEPRSFSQNPPVL | GGAACAGAGGCATGACCGCCTTACTGAAGGTTTCTAGTTGTGA |
| | KRHQREITRTTLQSD | CAAGAACACTGGTGATTATTACGAGGACAGTTATGAAGATATT |
| | QEEIDYDDTISVEMK | TCAGCATACTTGCTGAGTAAAAACAATGCCATTGAACCAAGA |
| | KEDFDIYDEDENQSP | AGCTTCTCTCAAAACCCACCAGTCTTGAAACGCCATCAACGGG |
| | RSFQKKTRHYFIAAV | AAATAACTCGTACTACTCTTCAGTCAGATCAAGAGGAAATCGA |
| | ERLWDYGMSSSPHVL | TTATGATGATACCATATCAGTTGAAATGAAGAAGGAAGATTTT |
| | RNRAQSGSVPQFKKV | GACATTTATGATGAGGATGAAAATCAGAGCCCCCGCAGCTTTC |
| | VFQEFTDGSFTQPLY | AAAAGAAAACACGACACTATTTTATTGCTGCAGTGGAGAGGC |
| | RGELNEHLGLLGPYI | TCTGGGATTATGGGATGAGTAGCTCCCCACATGTTCTAAGAAA |
| | RAEVEDNIMVTFRNQ | CAGGGCTCAGAGTGGCAGTGTCCCTCAGTTCAAGAAAGTTGTT |
| | ASRPYSFYSSLISYEE | TTCCAGGAATTTACTGATGGCTCCTTTACTCAGCCCTTATACCG |
| | DQRQGAEPRKNFVKP | TGGAGAACTAAATGAACATTTGGGACTCCTGGGGCCATATATA |
| | NETKTYFWKVQHHM | AGAGCAGAAGTTGAAGATAATATCATGGTAACTTTCAGAAAT |
| | APTKDEFDCKAWAY | CAGGCCTCTCGTCCCTATTCCTTCTATTCTAGCCTTATTTCTTAT |
| | FSDVDLEKDVHSGLI | GAGGAAGATCAGAGGCAAGGAGCAGAACCTAGAAAAAACTTT |
| | GPLLVCHTNTLNPAH | GTCAAGCCTAATGAAACCAAAACTTACTTTTGGAAAGTGCAAC |
| | GRQVTVQEFALFFTIF | ATCATATGGCACCCACTAAAGATGAGTTTGACTGCAAAGCCTG |
| | DETKSWYFTENMER | GGCTTATTTCTCTGATGTTGACCTGGAAAAAGATGTGCACTCA |
| | NCRAPCNIQMEDPTF | GGCCTGATTGGACCCCTTCTGGTCTGCCACACTAACACACTGA |
| | KENYRFHAINGYIMD | ACCCTGCTCATGGGAGACAAGTGACAGTACAGGAATTTGCTCT |
| | TLPGLVMAQDQRIR | GTTTTTCACCATCTTTGATGAGACCAAAAGCTGGTACTTCACT |
| | WYLLSMGSNENIHSI | GAAAATATGGAAAGAAACTGCAGGGCTCCCTGCAATATCCAG |
| | HFSGHVFTVRKKEEY | ATGGAAGATCCCACTTTTAAAGAGAATTATCGCTTCCATGCAA |
| | KMALYNLYPGVFET | TCAATGGCTACATAATGGATACACTACCTGGCTTAGTAATGGC |
| | VEMLPSKAGIWRVEC | TCAGGATCAAAGGATTCGATGGTATCTGCTCAGCATGGGCAGC |
| | LIGEHLHAGMSTLFL | AATGAAAACATCCATTCTATTCATTTCAGTGGACATGTGTTCA |
| | VYSNKCQTPLGMAS | CTGTACGAAAAAAAGAGGAGTATAAAATGGCACTGTACAATC |
| | GHIRDFQITASGQYG | TCTATCCAGGTGTTTTTGAGACAGTGGAAATGTTACCATCCAA |
| | QWAPKLARLHYSGSI | AGCTGGAATTTGGCGGGTGGAATGCCTTATTGGCGAGCATCTA |
| | NAWSTKEPFSWIKVD | CATGCTGGGATGAGCACACTTTTTCTGGTGTACAGCAATAAGT |
| | LLAPMIIHGIKTQGAR | GTCAGACTCCCCTGGGAATGGCTTCTGGACACATTAGAGATTT |
| | QKFSSLYISQFIIMYSL | TCAGATTACAGCTTCAGGACAATATGGACAGTGGGCCCCAAA |
| | DGKKWQTYRGNSTG | GCTGGCCAGACTTCATTATTCCGGATCAATCAATGCCTGGAGC |
| | TLMVFFGNVDSSGIK | ACCAAGGAGCCCTTTTCTTGGATCAAGGTGGATCTGTTGGCAC |
| | HNIFNPPIIARYIRLHP | CAATGATTATTCACGGCATCAAGACCCAGGGTGCCCGTCAGAA |
| | THYSIRSTLRMELMG | GTTCTCCAGCCTCTACATCTCTCAGTTTATCATCATGTATAGTC |
| | CDLNSCSMPLGMESK | TTGATGGGAAGAAGTGGCAGACTTATCGAGGAAATTCCACTG |
| | AISDAQITASSYFTNM | GAACCTTAATGGTCTTCTTTGGCAATGTGGATTCATCTGGGAT |
| | FATWSPSKARLHLQG | AAAACACAATATTTTTAACCCTCCAATTATTGCTCGATACATC |
| | RSNAWRPQVNNPKE | CGTTTGCACCCAACTCATTATAGCATTCGCAGCACTCTTCGCAT |
| | WLQVDFQKTMKVTG | GGAGTTGATGGGCTGTGATTTAAATAGTTGCAGCATGCCATTG |
| | VTTQGVKSLLTSMYV | GGAATGGAGAGTAAAGCAATATCAGATGCACAGATTACTGCT |
| | KEFLISSSQDGHQWT | TCATCCTACTTTACCAATATGTTTGCCACCTGGTCTCCTTCAAA |
| | LFFQNGKVKVFQGN | AGCTCGACTTCACCTCCAAGGGAGGAGTAATGCCTGGAGACCT |
| | QDSFTPVVNSLDPPLL | CAGGTGAATAATCCAAAAGAGTGGCTGCAAGTGGACTTCCAG |
| | TRYLRIHPQSWVHQI | AAGACAATGAAAGTCACAGGAGTAACTACTCAGGGAGTAAAA |
| | ALRMEVLGCEAQDL | TCTCTGCTTACCAGCATGTATGTGAAGGAGTTCCTCATCTCCA |
| | YGAGSPGAETAGTSE | GCAGTCAAGATGGCCATCAGTGGACTCTCTTTTTTCAGAATGG |
| | SATPESGPGSEPATSG | CAAAGTAAAGGTTTTTCAGGGAAATCAAGACTCCTTCACACCT |
| | SETPGTSESATPESGP | GTGGTGAACTCTCTAGACCCACCGTTACTGACTCGCTACCTTC |
| | GSEPATSGSETPGTSE | GAATTCACCCCCAGAGTTGGGTGCACCAGATTGCCCTGAGGAT |
| | SATPESGPGTSTEPSE | GGAGGTTCTGGGCTGCGAGGCACAGGACCTCTACGGCGCCGG |
| | GSAPGSPAGSPTSTEE | ATCACCTGGGGCCGAAACGGCCGGTACCTCAGAGTCTGCTACC |
| | GTSESATPESGPGSEP | CCCGAGTCAGGGCCAGGATCAGAGCCAGCCACCTCCGGGTCT |
| | ATSGSETPGTSESATP | GAGACACCCGGGACTTCCGAGAGTGCCACCCCTGAGTCCGGA |
| | ESGPGSPAGSPTSTEE | CCCGGGTCCGAGCCCGCCACTTCCGGCTCCGAAACTCCCGGCA |
| | GSPAGSPTSTEEGTST | CAAGCGAGAGCGCTACCCCAGAGTCAGGACCAGGAACATCTA |
| | EPSEGSAPGTSESATP | CAGAGCCCTCTGAAGGCTCCGCTCCAGGGTCCCCAGCCGGCAG |
| | ESGPGTSESATPESGP | TCCCACTAGCACCGAGGAGGGAACCTCTGAAAGCGCCACACC |
| | GTSESATPESGPGSEP | CGAATCAGGGCCAGGGTCTGAGCCTGCTACCAGCGGCAGCGA |
| | ATSGSETPGSEPATSG | GACACCAGGCACCTCTGAGTCCGCCACACCAGAGTCCGGACC |
| | SETPGSPAGSPTSTEE | CGGATCTCCCGCTGGGAGCCCCACCTCCACTGAGGAGGGATCT |
| | GTSTEPSEGSAPGTST | CCTGCTGGCTCTCCAACATCTACTGAGGAAGGTACCTCAACCG |
| | EPSEGSAPGSEPATSG | AGCCATCCGAGGGATCAGCTCCCGGCACCTCAGAGTCGGCAA |
| | SETPGTSESATPESGP | CCCCGGAGTCTGGACCCGGAACTTCCGAAAGTGCCACACCAG |
| | GTSTEPSEGSAPGAET | AGTCCGGTCCCGGGACTTCAGAATCAGCAACACCCGAGTCCG |
| | AEQKLISEEDLSPATG | GCCCTGGGTCTGAACCCGCCACAAGTGGTAGTGAGACACCAG |
| | | GATCAGAACCTGCTACCTCAGGGTCAGAGACACCCGGATCTCC |
| | | GGCAGGCTCACCAACCTCCACTGAGGAGGGCACCAGCACAGA |
| | | ACCAAGCGAGGGCTCCGCACCCGGAACAAGCACTGAACCCAG |
| | | TGAGGGTTCAGCACCCGGCTCTGAGCCGGCCACAAGTGGCAG |
| | | TGAGACACCCGGCACTTCAGAGAGTGCCACCCCCGAGAGTGG |
| | | CCCAGGCACTAGTACCGAGCCCTCTGAAGGCAGTGCGCCAGG |
| | | GGCCGAAACGGCCGAACAAAAACTCATCTCAGAAGAGGATCT |
| | | GTCACCTGCAACCGGTTGA |
| pBC0146 | MQIELSTCFFLCLLRF | ATGCAAATAGAGCTCTCCACCTGCTTCTTTCTGTGCCTTTTGCG |
| | CFSATRRYYLGAVEL | ATTCTGCTTTAGTGCCACCAGAAGATACTACCTGGGTGCAGTG |
| | SWDYMQSDLGELPV | GAACTGTCATGGGACTATATGCAAAGTGATCTCGGTGAGCTGC |
| | DARFPPRVPKSFPFNT | CTGTGGACGCAAGATTTCCTCCTAGAGTGCCAAAATCTTTTCC |
| | SVVYKKTLFVEFTDH | ATTCAACACCTCAGTCGTGTACAAAAAGACTCTGTTTGTAGAA |
| | LFNIAKPRPPWMGLL | TTCACGGATCACCTTTTCAACATCGCTAAGCCAAGGCCACCCT |
| | GPTIQAEVYDTVVITL | GGATGGGTCTGCTAGGTCCTACCATCCAGGCTGAGGTTTATGA |
| | KNMASHPVSLHAVG | TACAGTGGTCATTACACTTAAGAACATGGCTTCCCATCCTGTC |
| | VSYWKASEGAEYDD | AGTCTTCATGCTGTTGGTGTATCCTACTGGAAAGCTTCTGAGG |
| | QTSQREKEDDKVFPG | GAGCTGAATATGATGATCAGACCAGTCAAAGGGAGAAAGAAG |
| | GSHTYVWQVLKENG | ATGATAAAGTCTTCCCTGGTGGAAGCCATACATATGTCTGGCA |
| | PMASDPLCLTYSYLS | GGTCCTGAAAGAGAATGGTCCAATGGCCTCTGACCCACTGTGC |
| | HVDLVKDLNSGLIGA | CTTACCTACTCATATCTTTCTCATGTGGACCTGGTAAAAGACTT |
| | LLVCREGSLAKEKTQ | GAATTCAGGCCTCATTGGAGCCCTACTAGTATGTAGAGAAGGG |
| | TLHKFILLFAVFDEGK | AGTCTGGCCAAGGAAAAGACACAGACCTTGCACAAATTTATA |
| | SWHSETKNSLMQDR | CTACTTTTTGCTGTATTTGATGAAGGGAAAAGTTGGCACTCAG |
| | DAASARAWPKMHTV | AAACAAAGAACTCCTTGATGCAGGATAGGGATGCTGCATCTG |
| | NGYVNRSLPGLIGCH | CTCGGGCCTGGCCTAAAATGCACACAGTCAATGGTTATGTAAA |
| | RKSVYWHVIGMGTT | CAGGTCTCTGCCAGGTCTGATTGGATGCCACAGGAAATCAGTC |
| | PEVHSIFLEGHTFLVR | TATTGGCATGTGATTGGAATGGGCACCACTCCTGAAGTGCACT |
| | NHRQASLEISPITFLT | CAATATTCCTCGAAGGTCACACATTTCTTGTGAGGAACCATCG |
| | AQTLLMDLGQFLLFC | CCAGGCTAGCTTGGAAATCTCGCCAATAACTTTCCTTACTGCT |
| | HISSHQHDGMEAYVK | CAAACACTCTTGATGGACCTTGGACAGTTTCTACTGTTTTGTCA |
| | VDSCPEEPQLRMKNN | TATCTCTTCCCACCAACATGATGGCATGGAAGCTTATGTCAAA |
| | EEAEDYDDDLTDSEM | GTAGACAGCTGTCCAGAGGAACCCCAACTACGAATGAAAAAT |
| | DVVRFDDDNSPSFIQI | AATGAAGAAGCGGAAGACTATGATGATGATCTTACTGATTCTG |
| | RSVAKKHPKTWVHYI | AAATGGATGTGGTCAGGTTTGATGATGACAACTCTCCTTCCTT |
| | AAEEEDWDYAPLVL | TATCCAAATTCGCTCAGTTGCCAAGAAGCATCCTAAAACTTGG |
| | APDDRSYKSQYLNNG | GTACATTACATTGCTGCTGAAGAGGAGGACTGGGACTATGCTC |
| | PQRIGRKYKKVRFMA | CCTTAGTCCTCGCCCCCGATGACAGAAGTTATAAAAGTCAATA |
| | YTDETFKTREAIQHES | TTTGAACAATGGCCCTCAGCGGATTGGTAGGAAGTACAAAAA |
| | GILGPLLYGEVGDTL | AGTCCGATTTATGGCATACACAGATGAAACCTTTAAGACTCGT |
| | LIIFKNQASRPYNIYP | GAAGCTATTCAGCATGAATCAGGAATCTTGGGACCTTTACTTT |
| | HGITDVRPLYSRRLPK | ATGGGGAAGTTGGAGACACACTGTTGATTATATTTAAGAATCA |
| | GVKHLKDFPILPGEIF | AGCAAGCAGACCATATAACATCTACCCTCACGGAATCACTGAT |
| | KYKWTVTVEDGPTK | GTCCGTCCTTTGTATTCAAGGAGATTACCAAAAGGTGTAAAAC |
| | SDPRCLTRYYSSFVN | ATTTGAAGGATTTTCCAATTCTGCCAGGAGAAATATTCAAATA |
| | MERDLASGLIGPLLIC | TAAATGGACAGTGACTGTAGAAGATGGGCCAACTAAATCAGA |
| | YKESVDQRGNQIMSD | TCCTCGGTGCCTGACCCGCTATTACTCTAGTTTCGTTAATATGG |
| | KRNVILFSVFDENRS | AGAGAGATCTAGCTTCAGGACTCATTGGCCCTCTCCTCATCTG |
| | WYLTENIQRFLPNPA | CTACAAAGAATCTGTAGATCAAAGAGGAAACCAGATAATGTC |
| | GVQLEDPEFQASNIM | AGACAAGAGGAATGTCATCCTGTTTTCTGTATTTGATGAGAAC |
| | HSINGYVFDSLQLSV | CGAAGCTGGTACCTCACAGAGAATATACAACGCTTTCTCCCCA |
| | CLHEVAYWYILSIGA | ATCCAGCTGGAGTGCAGCTTGAGGATCCAGAGTTCCAAGCCTC |
| | QTDFLSVFFSGYTFK | CAACATCATGCACAGCATCAATGGCTATGTTTTTGATAGTTTG |
| | HKMVYEDTLTLFPFS | CAGTTGTCAGTTTGTTTGCATGAGGTGGCATACTGGTACATTCT |
| | GETVFMSMENPGLWI | AAGCATTGGAGCACAGACTGACTTCCTTTCTGTCTTCTTCTCTG |
| | LGCHNSDFRNRGMT | GATATACCTTCAAACACAAAATGGTCTATGAAGACACACTCAC |
| | ALLKVSSCDKNTGDY | CCTATTCCCATTCTCAGGAGAAACTGTCTTCATGTCGATGGAA |
| | YEDSYEDISAYLLSK | AACCCAGGTCTATGGATTCTGGGGTGCCACAACTCAGACTTTC |
| | NNAIEPRSFSQNPPVL | GGAACAGAGGCATGACCGCCTTACTGAAGGTTTCTAGTTGTGA |
| | KRHQREITRTTLQSD | CAAGAACACTGGTGATTATTACGAGGACAGTTATGAAGATATT |
| | QEEIDYDDTISVEMK | TCAGCATACTTGCTGAGTAAAAACAATGCCATTGAACCAAGA |
| | KEDFDIYDEDENQSP | AGCTTCTCTCAAAACCCACCAGTCTTGAAACGCCATCAACGGG |
| | RSFQKKTRHYFIAAV | AAATAACTCGTACTACTCTTCAGTCAGATCAAGAGGAAATCGA |
| | ERLWDYGMSSSPHVL | TTATGATGATACCATATCAGTTGAAATGAAGAAGGAAGATTTT |
| | RNRAQSGSVPQFKKV | GACATTTATGATGAGGATGAAAATCAGAGCCCCCGCAGCTTTC |
| | VFQEFTDGSFTQPLY | AAAAGAAAACACGACACTATTTTATTGCTGCAGTGGAGAGGC |
| | RGELNEHLGLLGPYI | TCTGGGATTATGGGATGAGTAGCTCCCCACATGTTCTAAGAAA |
| | RAEVEDNIMVTFRNQ | CAGGGCTCAGAGTGGCAGTGTCCCTCAGTTCAAGAAAGTTGTT |
| | ASRPYSFYSSLISYEE | TTCCAGGAATTTACTGATGGCTCCTTTACTCAGCCCTTATACCG |
| | DQRQGAEPRKNFVKP | TGGAGAACTAAATGAACATTTGGGACTCCTGGGGCCATATATA |
| | NETKTYFWKVQHHM | AGAGCAGAAGTTGAAGATAATATCATGGTAACTTTCAGAAAT |
| | APTKDEFDCKAWAY | CAGGCCTCTCGTCCCTATTCCTTCTATTCTAGCCTTATTTCTTAT |
| | FSDVDLEKDVHSGLI | GAGGAAGATCAGAGGCAAGGAGCAGAACCTAGAAAAAACTTT |
| | GPLLVCHTNTLNPAH | GTCAAGCCTAATGAAACCAAAACTTACTTTTGGAAAGTGCAAC |
| | GRQVTVQEFALFFTIF | ATCATATGGCACCCACTAAAGATGAGTTTGACTGCAAAGCCTG |
| | DETKSWYFTENMER | GGCTTATTTCTCTGATGTTGACCTGGAAAAAGATGTGCACTCA |
| | NCRAPCNIQMEDPTF | GGCCTGATTGGACCCCTTCTGGTCTGCCACACTAACACACTGA |
| | KENYRFHAINGYIMD | ACCCTGCTCATGGGAGACAAGTGACAGTACAGGAATTTGCTCT |
| | TLPGLVMAQDQRIR | GTTTTTCACCATCTTTGATGAGACCAAAAGCTGGTACTTCACT |
| | WYLLSMGSNENIHSI | GAAAATATGGAAAGAAACTGCAGGGCTCCCTGCAATATCCAG |
| | HFSGHVFTVRKKEEY | ATGGAAGATCCCACTTTTAAAGAGAATTATCGCTTCCATGCAA |
| | KMALYNLYPGVFET | TCAATGGCTACATAATGGATACACTACCTGGCTTAGTAATGGC |
| | VEMLPSKAGIWRVEC | TCAGGATCAAAGGATTCGATGGTATCTGCTCAGCATGGGCAGC |
| | LIGEHLHAGMSTLFL | AATGAAAACATCCATTCTATTCATTTCAGTGGACATGTGTTCA |
| | VYSNKCQTPLGMAS | CTGTACGAAAAAAAGAGGAGTATAAAATGGCACTGTACAATC |
| | GHIRDFQITASGQYG | TCTATCCAGGTGTTTTTGAGACAGTGGAAATGTTACCATCCAA |
| | QWAPKLARLHYSGSI | AGCTGGAATTTGGCGGGTGGAATGCCTTATTGGCGAGCATCTA |
| | NAWSTKEPFSWIKVD | CATGCTGGGATGAGCACACTTTTTCTGGTGTACAGCAATAAGT |
| | LLAPMIIHGIKTQGAR | GTCAGACTCCCCTGGGAATGGCTTCTGGACACATTAGAGATTT |
| | QKFSSLYISQFIIMYSL | TCAGATTACAGCTTCAGGACAATATGGACAGTGGGCCCCAAA |
| | DGKKWQTYRGNSTG | GCTGGCCAGACTTCATTATTCCGGATCAATCAATGCCTGGAGC |
| | TLMVFFGNVDSSGIK | ACCAAGGAGCCCTTTTCTTGGATCAAGGTGGATCTGTTGGCAC |
| | HNIFNPPIIARYIRLHP | CAATGATTATTCACGGCATCAAGACCCAGGGTGCCCGTCAGAA |
| | THYSIRSTLRMELMG | GTTCTCCAGCCTCTACATCTCTCAGTTTATCATCATGTATAGTC |
| | CDLNSCSMPLGMESK | TTGATGGGAAGAAGTGGCAGACTTATCGAGGAAATTCCACTG |
| | AISDAQITASSYFTNM | GAACCTTAATGGTCTTCTTTGGCAATGTGGATTCATCTGGGAT |
| | FATWSPSKARLHLQG | AAAACACAATATTTTTAACCCTCCAATTATTGCTCGATACATC |
| | RSNAWRPQVNNPKE | CGTTTGCACCCAACTCATTATAGCATTCGCAGCACTCTTCGCAT |
| | WLQVDFQKTMKVTG | GGAGTTGATGGGCTGTGATTTAAATAGTTGCAGCATGCCATTG |
| | VTTQGVKSLLTSMYV | GGAATGGAGAGTAAAGCAATATCAGATGCACAGATTACTGCT |
| | KEFLISSSQDGHQWT | TCATCCTACTTTACCAATATGTTTGCCACCTGGTCTCCTTCAAA |
| | LFFQNGKVKVFQGN | AGCTCGACTTCACCTCCAAGGGAGGAGTAATGCCTGGAGACCT |
| | QDSFTPVVNSLDPPLL | CAGGTGAATAATCCAAAAGAGTGGCTGCAAGTGGACTTCCAG |
| | TRYLRIHPQSWVHQI | AAGACAATGAAAGTCACAGGAGTAACTACTCAGGGAGTAAAA |
| | ALRMEVLGCEAQDL | TCTCTGCTTACCAGCATGTATGTGAAGGAGTTCCTCATCTCCA |
| | YGAGSPGAETAPGAS | GCAGTCAAGATGGCCATCAGTGGACTCTCTTTTTTCAGAATGG |
| | PGTSSTGSPGASPGTS | CAAAGTAAAGGTTTTTCAGGGAAATCAAGACTCCTTCACACCT |
| | STGSPGTPGSGTASSS | GTGGTGAACTCTCTAGACCCACCGTTACTGACTCGCTACCTTC |
| | PGSSTPSGATGSPGTP | GAATTCACCCCCAGAGTTGGGTGCACCAGATTGCCCTGAGGAT |
| | GSGTASSSPGSSTPSG | GGAGGTTCTGGGCTGCGAGGCACAGGACCTCTACGGCGCCGG |
| | ATGSPGTPGSGTASSS | ATCACCTGGGGCCGAAACGGCCCCGGGAGCGTCACCCGGTAC |
| | PGSSTPSGATGSPGSS | GTCCTCAACGGGGAGCCCTGGGGCATCACCCGGCACGTCCTCG |
| | TPSGATGSPGSSPSAS | ACAGGGTCCCCCGGAACACCGGGTTCGGGGACTGCGTCGTCGT |
| | TGTGPGSSPSASTGTG | CACCCGGTTCGTCAACACCCAGCGGTGCGACGGGTTCCCCGGG |
| | PGASPGTSSTGSPGTP | AACCCCCGGATCAGGAACAGCGTCGTCGAGCCCCGGAAGCTC |
| | GSGTASSSPGSSTPSG | GACCCCGTCAGGAGCGACCGGGTCGCCAGGAACGCCTGGGTC |
| | ATGSPGSSPSASTGTG | GGGTACTGCCTCATCGTCGCCGGGTTCATCGACGCCCTCCGGA |
| | PGSSPSASTGTGPGAS | GCAACAGGTTCACCCGGGTCGTCCACCCCCAGCGGAGCGACT |
| | PGTSSTGSPGASPGTS | GGATCACCGGGATCGAGCCCGTCGGCATCGACAGGAACAGGT |
| | STGSPGSSTPSGATGS | CCCGGTAGCTCCCCATCGGCCTCCACGGGGACGGGGCCTGGTG |
| | PGSSPSASTGTGPGAS | CGTCACCGGGGACAAGCAGCACGGGTTCGCCGGGAACGCCAG |
| | PGTSSTGSPGSSPSAS | GGTCAGGGACCGCGTCGTCGAGCCCAGGGTCGTCCACCCCAA |
| | TGTGPGTPGSGTASSS | GCGGGGCTACTGGGTCCCCGGGTAGCTCGCCGAGCGCATCAA |
| | PGSSTPSGATGSGAET | CGGGAACCGGACCGGGCAGCTCCCCCTCAGCGTCGACAGGGA |
| | AEQKLISEEDLSPATG | CAGGCCCTGGCGCGAGCCCGGGAACATCGTCGACGGGGTCAC |
| | | CCGGAGCATCGCCAGGGACCTCGTCAACTGGCTCGCCTGGATC |
| | | GTCAACGCCCTCGGGAGCCACGGGGTCGCCCGGATCATCCCCG |
| | | TCCGCCTCAACTGGCACAGGCCCTGGTGCTTCCCCTGGAACGT |
| | | CCAGCACAGGCTCCCCCGGTTCCAGCCCTTCCGCTTCGACTGG |
| | | GACTGGACCCGGAACCCCGGGATCGGGGACAGCGTCAAGCTC |
| | | GCCCGGAAGCTCCACGCCTTCGGGGGCAACCGGGTCAGGGGC |
| | | CGAAACGGCCGAACAAAAACTCATCTCAGAAGAGGATCTGTC |
| | | ACCTGCAACCGGTTGA |
| pBC0209 | MQIELSTCFFLCLLRF | ATGCAAATAGAGCTCTCCACCTGCTTCTTTCTGTGCCTTTTGCG |
| | CFSATRRYYLGAVEL | ATTCTGCTTTAGTGCCACCAGAAGATACTACCTGGGTGCAGTG |
| | SWDYMQSDLGELPV | GAACTGTCATGGGACTATATGCAAAGTGATCTCGGTGAGCTGC |
| | DARFPPRVPKSFPFNT | CTGTGGACGCAAGATTTCCTCCTAGAGTGCCAAAATCTTTTCC |
| | SVVYKKTLFVEFTDH | ATTCAACACCTCAGTCGTGTACAAAAAGACTCTGTTTGTAGAA |
| | LFNIAKPRPPWMGLL | TTCACGGATCACCTTTTCAACATCGCTAAGCCAAGGCCACCCT |
| | GPTIQAEVYDTVVITL | GGATGGGTCTGCTAGGTCCTACCATCCAGGCTGAGGTTTATGA |
| | KNMASHPVSLHAVG | TACAGTGGTCATTACACTTAAGAACATGGCTTCCCATCCTGTC |
| | VSYWKASEGAEYDD | AGTCTTCATGCTGTTGGTGTATCCTACTGGAAAGCTTCTGAGG |
| | QTSQREKEDDKVFPG | GAGCTGAATATGATGATCAGACCAGTCAAAGGGAGAAAGAAG |
| | GSHTYVWQVLKENG | ATGATAAAGTCTTCCCTGGTGGAAGCCATACATATGTCTGGCA |
| | PMASDPLCLTYSYLS | GGTCCTGAAAGAGAATGGTCCAATGGCCTCTGACCCACTGTGC |
| | HVDLVKDLNSGLIGA | CTTACCTACTCATATCTTTCTCATGTGGACCTGGTAAAAGACTT |
| | LLVCREGSLAKEKTQ | GAATTCAGGCCTCATTGGAGCCCTACTAGTATGTAGAGAAGGG |
| | TLHKFILLFAVFDEGK | AGTCTGGCCAAGGAAAAGACACAGACCTTGCACAAATTTATA |
| | SWHSETKNSLMQDR | CTACTTTTTGCTGTATTTGATGAAGGGAAAAGTTGGCACTCAG |
| | DAASARAWPKMHTV | AAACAAAGAACTCCTTGATGCAGGATAGGGATGCTGCATCTG |
| | NGYVNRSLPGLIGCH | CTCGGGCCTGGCCTAAAATGCACACAGTCAATGGTTATGTAAA |
| | RKSVYWHVIGMGTT | CAGGTCTCTGCCAGGTCTGATTGGATGCCACAGGAAATCAGTC |
| | PEVHSIFLEGHTFLVR | TATTGGCATGTGATTGGAATGGGCACCACTCCTGAAGTGCACT |
| | NHRQASLEISPITFLT | CAATATTCCTCGAAGGTCACACATTTCTTGTGAGGAACCATCG |
| | AQTLLMDLGQFLLFC | CCAGGCTAGCTTGGAAATCTCGCCAATAACTTTCCTTACTGCT |
| | HISSHQHDGMEAYVK | CAAACACTCTTGATGGACCTTGGACAGTTTCTACTGTTTTGTCA |
| | VDSCPEEPQLRMKNN | TATCTCTTCCCACCAACATGATGGCATGGAAGCTTATGTCAAA |
| | EEAEDYDDDLTDSEM | GTAGACAGCTGTCCAGAGGAACCCCAACTACGAATGAAAAAT |
| | DVVRFDDDNSPSFIQI | AATGAAGAAGCGGAAGACTATGATGATGATCTTACTGATTCTG |
| | RSVAKKHPKTWVHYI | AAATGGATGTGGTCAGGTTTGATGATGACAACTCTCCTTCCTT |
| | AAEEEDWDYAPLVL | TATCCAAATTCGCTCAGTTGCCAAGAAGCATCCTAAAACTTGG |
| | APDDRSYKSQYLNNG | GTACATTACATTGCTGCTGAAGAGGAGGACTGGGACTATGCTC |
| | PQRIGRKYKKVRFMA | CCTTAGTCCTCGCCCCCGATGACAGAAGTTATAAAAGTCAATA |
| | YTDETFKTREAIQHES | TTTGAACAATGGCCCTCAGCGGATTGGTAGGAAGTACAAAAA |
| | GILGPLLYGEVGDTL | AGTCCGATTTATGGCATACACAGATGAAACCTTTAAGACTCGT |
| | LIIFKNQASRPYNIYP | GAAGCTATTCAGCATGAATCAGGAATCTTGGGACCTTTACTTT |
| | HGITDVRPLYSRRLPK | ATGGGGAAGTTGGAGACACACTGTTGATTATATTTAAGAATCA |
| | GVKHLKDFPILPGEIF | AGCAAGCAGACCATATAACATCTACCCTCACGGAATCACTGAT |
| | KYKWTVTVEDGPTK | GTCCGTCCTTTGTATTCAAGGAGATTACCAAAAGGTGTAAAAC |
| | SDPRCLTRYYSSFVN | ATTTGAAGGATTTTCCAATTCTGCCAGGAGAAATATTCAAATA |
| | MERDLASGLIGPLLIC | TAAATGGACAGTGACTGTAGAAGATGGGCCAACTAAATCAGA |
| | YKESVDQRGNQIMSD | TCCTCGGTGCCTGACCCGCTATTACTCTAGTTTCGTTAATATGG |
| | KRNVILFSVFDENRS | AGAGAGATCTAGCTTCAGGACTCATTGGCCCTCTCCTCATCTG |
| | WYLTENIQRFLPNPA | CTACAAAGAATCTGTAGATCAAAGAGGAAACCAGATAATGTC |
| | GVQLEDPEFQASNIM | AGACAAGAGGAATGTCATCCTGTTTTCTGTATTTGATGAGAAC |
| | HSINGYVFDSLQLSV | CGAAGCTGGTACCTCACAGAGAATATACAACGCTTTCTCCCCA |
| | CLHEVAYWYILSIGA | ATCCAGCTGGAGTGCAGCTTGAGGATCCAGAGTTCCAAGCCTC |
| | QTDFLSVFFSGYTFK | CAACATCATGCACAGCATCAATGGCTATGTTTTTGATAGTTTG |
| | HKMVYEDTLTLFPFS | CAGTTGTCAGTTTGTTTGCATGAGGTGGCATACTGGTACATTCT |
| | GETVFMSMENPGLWI | AAGCATTGGAGCACAGACTGACTTCCTTTCTGTCTTCTTCTCTG |
| | LGCHNSDFRNRGMT | GATATACCTTCAAACACAAAATGGTCTATGAAGACACACTCAC |
| | ALLKVSSCDKNTGDY | CCTATTCCCATTCTCAGGAGAAACTGTCTTCATGTCGATGGAA |
| | YEDSYEDISAYLLSK | AACCCAGGTCTATGGATTCTGGGGTGCCACAACTCAGACTTTC |
| | NNAIEPRSFSQNGAPG | GGAACAGAGGCATGACCGCCTTACTGAAGGTTTCTAGTTGTGA |
| | TSESATPESGPGSEPA | CAAGAACACTGGTGATTATTACGAGGACAGTTATGAAGATATT |
| | TSGSETPGTSESATPE | TCAGCATACTTGCTGAGTAAAAACAATGCCATTGAACCAAGA |
| | SGPGSEPATSGSETPG | AGCTTCTCTCAAAACGGCGCGCCAGGTACCTCAGAGTCTGCTA |
| | TSESATPESGPGTSTE | CCCCCGAGTCAGGGCCAGGATCAGAGCCAGCCACCTCCGGGT |
| | PSEGSAPGSPAGSPTS | CTGAGACACCCGGGACTTCCGAGAGTGCCACCCCTGAGTCCGG |
| | TEEGTSESATPESGPG | ACCCGGGTCCGAGCCCGCCACTTCCGGCTCCGAAACTCCCGGC |
| | SEPATSGSETPGTSES | ACAAGCGAGAGCGCTACCCCAGAGTCAGGACCAGGAACATCT |
| | ATPESGPGSPAGSPTS | ACAGAGCCCTCTGAAGGCTCCGCTCCAGGGTCCCCAGCCGGCA |
| | TEEGSPAGSPTSTEEG | GTCCCACTAGCACCGAGGAGGGAACCTCTGAAAGCGCCACAC |
| | TSTEPSEGSAPGTSES | CCGAATCAGGGCCAGGGTCTGAGCCTGCTACCAGCGGCAGCG |
| | ATPESGPGTSESATPE | AGACACCAGGCACCTCTGAGTCCGCCACACCAGAGTCCGGAC |
| | SGPGTSESATPESGPG | CCGGATCTCCCGCTGGGAGCCCCACCTCCACTGAGGAGGGATC |
| | SEPATSGSETPGSEPA | TCCTGCTGGCTCTCCAACATCTACTGAGGAAGGTACCTCAACC |
| | TSGSETPGSPAGSPTS | GAGCCATCCGAGGGATCAGCTCCCGGCACCTCAGAGTCGGCA |
| | TEEGTSTEPSEGSAPG | ACCCCGGAGTCTGGACCCGGAACTTCCGAAAGTGCCACACCA |
| | TSTEPSEGSAPGSEPA | GAGTCCGGTCCCGGGACTTCAGAATCAGCAACACCCGAGTCC |
| | TSGSETPGTSESATPE | GGCCCTGGGTCTGAACCCGCCACAAGTGGTAGTGAGACACCA |
| | SGPGTSTEPSEGSAPA | GGATCAGAACCTGCTACCTCAGGGTCAGAGACACCCGGATCTC |
| | SSPPVLKRHQREITRT | CGGCAGGCTCACCAACCTCCACTGAGGAGGGCACCAGCACAG |
| | TLQSDQEEIDYDDTIS | AACCAAGCGAGGGCTCCGCACCCGGAACAAGCACTGAACCCA |
| | VEMKKEDFDIYDEDE | GTGAGGGTTCAGCACCCGGCTCTGAGCCGGCCACAAGTGGCA |
| | NQSPRSFQKKTRHYFI | GTGAGACACCCGGCACTTCAGAGAGTGCCACCCCCGAGAGTG |
| | AAVERLWDYGMSSS | GCCCAGGCACTAGTACCGAGCCCTCTGAAGGCAGTGCGCCAG |
| | PHVLRNRAQSGSVPQ | CCTCGAGCCCACCAGTCTTGAAACGCCATCAACGGGAAATAA |
| | FKKVVFQEFTDGSFT | CTCGTACTACTCTTCAGTCAGATCAAGAGGAAATCGATTATGA |
| | QPLYRGELNEHLGLL | TGATACCATATCAGTTGAAATGAAGAAGGAAGATTTTGACATT |
| | GPYIRAEVEDNIMVT | TATGATGAGGATGAAAATCAGAGCCCCCGCAGCTTTCAAAAG |
| | FRNQASRPYSFYSSLI | AAAACACGACACTATTTTATTGCTGCAGTGGAGAGGCTCTGGG |
| | SYEEDQRQGAEPRKN | ATTATGGGATGAGTAGCTCCCCACATGTTCTAAGAAACAGGGC |
| | FVKPNETKTYFWKV | TCAGAGTGGCAGTGTCCCTCAGTTCAAGAAAGTTGTTTTCCAG |
| | QHHMAPTKDEFDCK | GAATTTACTGATGGCTCCTTTACTCAGCCCTTATACCGTGGAG |
| | AWAYFSDVDLEKDV | AACTAAATGAACATTTGGGACTCCTGGGGCCATATATAAGAGC |
| | HSGLIGPLLVCHTNTL | AGAAGTTGAAGATAATATCATGGTAACTTTCAGAAATCAGGCC |
| | NPAHGRQVTVQEFAL | TCTCGTCCCTATTCCTTCTATTCTAGCCTTATTTCTTATGAGGA |
| | FFTIFDETKSWYFTEN | AGATCAGAGGCAAGGAGCAGAACCTAGAAAAAACTTTGTCAA |
| | MERNCRAPCNIQMED | GCCTAATGAAACCAAAACTTACTTTTGGAAAGTGCAACATCAT |
| | PTFKENYRFHAINGYI | ATGGCACCCACTAAAGATGAGTTTGACTGCAAAGCCTGGGCTT |
| | MDTLPGLVMAQDQR | ATTTCTCTGATGTTGACCTGGAAAAAGATGTGCACTCAGGCCT |
| | IRWYLLSMGSNENIH | GATTGGACCCCTTCTGGTCTGCCACACTAACACACTGAACCCT |
| | SIHFSGHVFTVRKKEE | GCTCATGGGAGACAAGTGACAGTACAGGAATTTGCTCTGTTTT |
| | YKMALYNLYPGVFE | TCACCATCTTTGATGAGACCAAAAGCTGGTACTTCACTGAAAA |
| | TVEMLPSKAGIWRVE | TATGGAAAGAAACTGCAGGGCTCCCTGCAATATCCAGATGGA |
| | CLIGEHLHAGMSTLF | AGATCCCACTTTTAAAGAGAATTATCGCTTCCATGCAATCAAT |
| | LVYSNKCQTPLGMAS | GGCTACATAATGGATACACTACCTGGCTTAGTAATGGCTCAGG |
| | GHIRDFQITASGQYG | ATCAAAGGATTCGATGGTATCTGCTCAGCATGGGCAGCAATGA |
| | QWAPKLARLHYSGSI | AAACATCCATTCTATTCATTTCAGTGGACATGTGTTCACTGTAC |
| | NAWSTKEPFSWIKVD | GAAAAAAAGAGGAGTATAAAATGGCACTGTACAATCTCTATC |
| | LLAPMIIHGIKTQGAR | CAGGTGTTTTTGAGACAGTGGAAATGTTACCATCCAAAGCTGG |
| | QKFSSLYISQFIIMYSL | AATTTGGCGGGTGGAATGCCTTATTGGCGAGCATCTACATGCT |
| | DGKKWQTYRGNSTG | GGGATGAGCACACTTTTTCTGGTGTACAGCAATAAGTGTCAGA |
| | TLMVFFGNVDSSGIK | CTCCCCTGGGAATGGCTTCTGGACACATTAGAGATTTTCAGAT |
| | HNIFNPPIIARYIRLHP | TACAGCTTCAGGACAATATGGACAGTGGGCCCCAAAGCTGGC |
| | THYSIRSTLRMELMG | CAGACTTCATTATTCCGGATCAATCAATGCCTGGAGCACCAAG |
| | CDLNSCSMPLGMESK | GAGCCCTTTTCTTGGATCAAGGTGGATCTGTTGGCACCAATGA |
| | AISDAQITASSYFTNM | TTATTCACGGCATCAAGACCCAGGGTGCCCGTCAGAAGTTCTC |
| | FATWSPSKARLHLQG | CAGCCTCTACATCTCTCAGTTTATCATCATGTATAGTCTTGATG |
| | RSNAWRPQVNNPKE | GGAAGAAGTGGCAGACTTATCGAGGAAATTCCACTGGAACCT |
| | WLQVDFQKTMKVTG | TAATGGTCTTCTTTGGCAATGTGGATTCATCTGGGATAAAACA |
| | VTTQGVKSLLTSMYV | CAATATTTTTAACCCTCCAATTATTGCTCGATACATCCGTTTGC |
| | KEFLISSSQDGHQWT | ACCCAACTCATTATAGCATTCGCAGCACTCTTCGCATGGAGTT |
| | LFFQNGKVKVFQGN | GATGGGCTGTGATTTAAATAGTTGCAGCATGCCATTGGGAATG |
| | QDSFTPVVNSLDPPLL | GAGAGTAAAGCAATATCAGATGCACAGATTACTGCTTCATCCT |
| | TRYLRIHPQSWVHQI | ACTTTACCAATATGTTTGCCACCTGGTCTCCTTCAAAAGCTCGA |
| | ALRMEVLGCEAQDL | CTTCACCTCCAAGGGAGGAGTAATGCCTGGAGACCTCAGGTG |
| | YGAGSPGAETAPGAS | AATAATCCAAAAGAGTGGCTGCAAGTGGACTTCCAGAAGACA |
| | PGTSSTGSPGASPGTS | ATGAAAGTCACAGGAGTAACTACTCAGGGAGTAAAATCTCTG |
| | STGSPGTPGSGTASSS | CTTACCAGCATGTATGTGAAGGAGTTCCTCATCTCCAGCAGTC |
| | PGSSTPSGATGSPGTP | AAGATGGCCATCAGTGGACTCTCTTTTTTCAGAATGGCAAAGT |
| | GSGTASSSPGSSTPSG | AAAGGTTTTTCAGGGAAATCAAGACTCCTTCACACCTGTGGTG |
| | ATGSPGTPGSGTASSS | AACTCTCTAGACCCACCGTTACTGACTCGCTACCTTCGAATTC |
| | PGSSTPSGATGSPGSS | ACCCCCAGAGTTGGGTGCACCAGATTGCCCTGAGGATGGAGG |
| | TPSGATGSPGSSPSAS | TTCTGGGCTGCGAGGCACAGGACCTCTACGGCGCCGGATCACC |
| | TGTGPGSSPSASTGTG | TGGGGCCGAAACGGCCCCGGGAGCGTCACCCGGTACGTCCTC |
| | PGASPGTSSTGSPGTP | AACGGGGAGCCCTGGGGCATCACCCGGCACGTCCTCGACAGG |
| | GSGTASSSPGSSTPSG | GTCCCCCGGAACACCGGGTTCGGGGACTGCGTCGTCGTCACCC |
| | ATGSPGSSPSASTGTG | GGTTCGTCAACACCCAGCGGTGCGACGGGTTCCCCGGGAACCC |
| | PGSSPSASTGTGPGAS | CCGGATCAGGAACAGCGTCGTCGAGCCCCGGAAGCTCGACCC |
| | PGTSSTGSPGASPGTS | CGTCAGGAGCGACCGGGTCGCCAGGAACGCCTGGGTCGGGTA |
| | STGSPGSSTPSGATGS | CTGCCTCATCGTCGCCGGGTTCATCGACGCCCTCCGGAGCAAC |
| | PGSSPSASTGTGPGAS | AGGTTCACCCGGGTCGTCCACCCCCAGCGGAGCGACTGGATCA |
| | PGTSSTGSPGSSPSAS | CCGGGATCGAGCCCGTCGGCATCGACAGGAACAGGTCCCGGT |
| | TGTGPGTPGSGTASSS | AGCTCCCCATCGGCCTCCACGGGGACGGGGCCTGGTGCGTCAC |
| | PGSSTPSGATGSGAET | CGGGGACAAGCAGCACGGGTTCGCCGGGAACGCCAGGGTCAG |
| | AEQKLISEEDLSPATG | GGACCGCGTCGTCGAGCCCAGGGTCGTCCACCCCAAGCGGGG |
| | | CTACTGGGTCCCCGGGTAGCTCGCCGAGCGCATCAACGGGAA |
| | | CCGGACCGGGCAGCTCCCCCTCAGCGTCGACAGGGACAGGCC |
| | | CTGGCGCGAGCCCGGGAACATCGTCGACGGGGTCACCCGGAG |
| | | CATCGCCAGGGACCTCGTCAACTGGCTCGCCTGGATCGTCAAC |
| | | GCCCTCGGGAGCCACGGGGTCGCCCGGATCATCCCCGTCCGCC |
| | | TCAACTGGCACAGGCCCTGGTGCTTCCCCTGGAACGTCCAGCA |
| | | CAGGCTCCCCCGGTTCCAGCCCTTCCGCTTCGACTGGGACTGG |
| | | ACCCGGAACCCCGGGATCGGGGACAGCGTCAAGCTCGCCCGG |
| | | AAGCTCCACGCCTTCGGGGGCAACCGGGTCAGGGGCCGAAAC |
| | | GGCCGAACAAAAACTCATCTCAGAAGAGGATCTGTCACCTGC |
| | | AACCGGTTGA |
| pBC0210 | MQIELSTCFFLCLLRF | ATGCAAATAGAGCTCTCCACCTGCTTCTTTCTGTGCCTTTTGCG |
| | CFSATRGAPGSPAGS | ATTCTGCTTTAGTGCCACCAGAGGCGCGCCAGGTTCTCCTGCT |
| | PTSTEEGTSESATPES | GGCTCCCCCACCTCAACAGAAGAGGGGACAAGCGAAAGCGCT |
| | GPGSEPATSGSETPAS | ACGCCTGAGAGTGGCCCTGGCTCTGAGCCAGCCACCTCCGGCT |
| | SATRRYYLGAVELSW | CTGAAACCCCTGCCTCGAGCGCTACAAGAAGATACTACCTGGG |
| | DYMQSDLGELPVDA | TGCAGTGGAACTGTCATGGGACTATATGCAAAGTGATCTCGGT |
| | RFPPRVPKSFPFNTSV | GAGCTGCCTGTGGACGCAAGATTTCCTCCTAGAGTGCCAAAAT |
| | VYKKTLFVEFTDHLF | CTTTTCCATTCAACACCTCAGTCGTGTACAAAAAGACTCTGTTT |
| | NIAKPRPPWMGLLGP | GTAGAATTCACGGATCACCTTTTCAACATCGCTAAGCCAAGGC |
| | TIQAEVYDTVVITLK | CACCCTGGATGGGTCTGCTAGGTCCTACCATCCAGGCTGAGGT |
| | NMASHPVSLHAVGV | TTATGATACAGTGGTCATTACACTTAAGAACATGGCTTCCCAT |
| | SYWKASEGAEYDDQ | CCTGTCAGTCTTCATGCTGTTGGTGTATCCTACTGGAAAGCTTC |
| | TSQREKEDDKVFPGG | TGAGGGAGCTGAATATGATGATCAGACCAGTCAAAGGGAGAA |
| | SHTYVWQVLKENGP | AGAAGATGATAAAGTCTTCCCTGGTGGAAGCCATACATATGTC |
| | MASDPLCLTYSYLSH | TGGCAGGTCCTGAAAGAGAATGGTCCAATGGCCTCTGACCCAC |
| | VDLVKDLNSGLIGAL | TGTGCCTTACCTACTCATATCTTTCTCATGTGGACCTGGTAAAA |
| | LVCREGSLAKEKTQT | GACTTGAATTCAGGCCTCATTGGAGCCCTACTAGTATGTAGAG |
| | LHKFILLFAVFDEGKS | AAGGGAGTCTGGCCAAGGAAAAGACACAGACCTTGCACAAAT |
| | WHSETKNSLMQDRD | TTATACTACTTTTTGCTGTATTTGATGAAGGGAAAAGTTGGCA |
| | AASARAWPKMHTVN | CTCAGAAACAAAGAACTCCTTGATGCAGGATAGGGATGCTGC |
| | GYVNRSLPGLIGCHR | ATCTGCTCGGGCCTGGCCTAAAATGCACACAGTCAATGGTTAT |
| | KSVYWHVIGMGTTPE | GTAAACAGGTCTCTGCCAGGTCTGATTGGATGCCACAGGAAAT |
| | VHSIFLEGHTFLVRNH | CAGTCTATTGGCATGTGATTGGAATGGGCACCACTCCTGAAGT |
| | RQASLEISPITFLTAQT | GCACTCAATATTCCTCGAAGGTCACACATTTCTTGTGAGGAAC |
| | LLMDLGQFLLFCHISS | CATCGCCAGGCTAGCTTGGAAATCTCGCCAATAACTTTCCTTA |
| | HQHDGMEAYVKVDS | CTGCTCAAACACTCTTGATGGACCTTGGACAGTTTCTACTGTTT |
| | CPEEPQLRMKNNEEA | TGTCATATCTCTTCCCACCAACATGATGGCATGGAAGCTTATG |
| | EDYDDDLTDSEMDV | TCAAAGTAGACAGCTGTCCAGAGGAACCCCAACTACGAATGA |
| | VRFDDDNSPSFIQIRS | AAAATAATGAAGAAGCGGAAGACTATGATGATGATCTTACTG |
| | VAKKHPKTWVHYIA | ATTCTGAAATGGATGTGGTCAGGTTTGATGATGACAACTCTCC |
| | AEEEDWDYAPLVLAP | TTCCTTTATCCAAATTCGCTCAGTTGCCAAGAAGCATCCTAAA |
| | DDRSYKSQYLNNGPQ | ACTTGGGTACATTACATTGCTGCTGAAGAGGAGGACTGGGACT |
| | RIGRKYKKVRFMAYT | ATGCTCCCTTAGTCCTCGCCCCCGATGACAGAAGTTATAAAAG |
| | DETFKTREAIQHESGI | TCAATATTTGAACAATGGCCCTCAGCGGATTGGTAGGAAGTAC |
| | LGPLLYGEVGDTLLII | AAAAAAGTCCGATTTATGGCATACACAGATGAAACCTTTAAG |
| | FKNQASRPYNIYPHGI | ACTCGTGAAGCTATTCAGCATGAATCAGGAATCTTGGGACCTT |
| | TDVRPLYSRRLPKGV | TACTTTATGGGGAAGTTGGAGACACACTGTTGATTATATTTAA |
| | KHLKDFPILPGEIFKY | GAATCAAGCAAGCAGACCATATAACATCTACCCTCACGGAAT |
| | KWTVTVEDGPTKSDP | CACTGATGTCCGTCCTTTGTATTCAAGGAGATTACCAAAAGGT |
| | RCLTRYYSSFVNMER | GTAAAACATTTGAAGGATTTTCCAATTCTGCCAGGAGAAATAT |
| | DLASGLIGPLLICYKE | TCAAATATAAATGGACAGTGACTGTAGAAGATGGGCCAACTA |
| | SVDQRGNQIMSDKRN | AATCAGATCCTCGGTGCCTGACCCGCTATTACTCTAGTTTCGTT |
| | VILFSVFDENRSWYL | AATATGGAGAGAGATCTAGCTTCAGGACTCATTGGCCCTCTCC |
| | TENIQRFLPNPAGVQL | TCATCTGCTACAAAGAATCTGTAGATCAAAGAGGAAACCAGA |
| | EDPEFQASNIMHSING | TAATGTCAGACAAGAGGAATGTCATCCTGTTTTCTGTATTTGA |
| | YVFDSLQLSVCLHEV | TGAGAACCGAAGCTGGTACCTCACAGAGAATATACAACGCTTT |
| | AYWYILSIGAQTDFLS | CTCCCCAATCCAGCTGGAGTGCAGCTTGAGGATCCAGAGTTCC |
| | VFFSGYTFKHKMVYE | AAGCCTCCAACATCATGCACAGCATCAATGGCTATGTTTTTGA |
| | DTLTLFPFSGETVFMS | TAGTTTGCAGTTGTCAGTTTGTTTGCATGAGGTGGCATACTGGT |
| | MENPGLWILGCHNSD | ACATTCTAAGCATTGGAGCACAGACTGACTTCCTTTCTGTCTTC |
| | FRNRGMTALLKVSSC | TTCTCTGGATATACCTTCAAACACAAAATGGTCTATGAAGACA |
| | DKNTGDYYEDSYEDI | CACTCACCCTATTCCCATTCTCAGGAGAAACTGTCTTCATGTCG |
| | SAYLLSKNNAIEPRSF | ATGGAAAACCCAGGTCTATGGATTCTGGGGTGCCACAACTCAG |
| | SQNGAPGTSESATPES | ACTTTCGGAACAGAGGCATGACCGCCTTACTGAAGGTTTCTAG |
| | GPGSEPATSGSETPGT | TTGTGACAAGAACACTGGTGATTATTACGAGGACAGTTATGAA |
| | SESATPESGPGSEPAT | GATATTTCAGCATACTTGCTGAGTAAAAACAATGCCATTGAAC |
| | SGSETPGTSESATPES | CAAGAAGCTTCTCTCAAAACGGCGCGCCAGGTACCTCAGAGTC |
| | GPGTSTEPSEGSAPGS | TGCTACCCCCGAGTCAGGGCCAGGATCAGAGCCAGCCACCTCC |
| | PAGSPTSTEEGTSESA | GGGTCTGAGACACCCGGGACTTCCGAGAGTGCCACCCCTGAGT |
| | TPESGPGSEPATSGSE | CCGGACCCGGGTCCGAGCCCGCCACTTCCGGCTCCGAAACTCC |
| | TPGTSESATPESGPGS | CGGCACAAGCGAGAGCGCTACCCCAGAGTCAGGACCAGGAAC |
| | PAGSPTSTEEGSPAGS | ATCTACAGAGCCCTCTGAAGGCTCCGCTCCAGGGTCCCCAGCC |
| | PTSTEEGTSTEPSEGS | GGCAGTCCCACTAGCACCGAGGAGGGAACCTCTGAAAGCGCC |
| | APGTSESATPESGPGT | ACACCCGAATCAGGGCCAGGGTCTGAGCCTGCTACCAGCGGC |
| | SESATPESGPGTSESA | AGCGAGACACCAGGCACCTCTGAGTCCGCCACACCAGAGTCC |
| | TPESGPGSEPATSGSE | GGACCCGGATCTCCCGCTGGGAGCCCCACCTCCACTGAGGAG |
| | TPGSEPATSGSETPGS | GGATCTCCTGCTGGCTCTCCAACATCTACTGAGGAAGGTACCT |
| | PAGSPTSTEEGTSTEP | CAACCGAGCCATCCGAGGGATCAGCTCCCGGCACCTCAGAGT |
| | SEGSAPGTSTEPSEGS | CGGCAACCCCGGAGTCTGGACCCGGAACTTCCGAAAGTGCCA |
| | APGSEPATSGSETPGT | CACCAGAGTCCGGTCCCGGGACTTCAGAATCAGCAACACCCG |
| | SESATPESGPGTSTEP | AGTCCGGCCCTGGGTCTGAACCCGCCACAAGTGGTAGTGAGA |
| | SEGSAPASSPPVLKRH | CACCAGGATCAGAACCTGCTACCTCAGGGTCAGAGACACCCG |
| | QREITRTTLQSDQEEI | GATCTCCGGCAGGCTCACCAACCTCCACTGAGGAGGGCACCA |
| | DYDDTISVEMKKEDF | GCACAGAACCAAGCGAGGGCTCCGCACCCGGAACAAGCACTG |
| | DIYDEDENQSPRSFQ | AACCCAGTGAGGGTTCAGCACCCGGCTCTGAGCCGGCCACAA |
| | KKTRHYFIAAVERLW | GTGGCAGTGAGACACCCGGCACTTCAGAGAGTGCCACCCCCG |
| | DYGMSSSPHVLRNRA | AGAGTGGCCCAGGCACTAGTACCGAGCCCTCTGAAGGCAGTG |
| | QSGSVPQFKKVVFQE | CGCCAGCCTCGAGCCCACCAGTCTTGAAACGCCATCAACGGG |
| | FTDGSFTQPLYRGEL | AAATAACTCGTACTACTCTTCAGTCAGATCAAGAGGAAATCGA |
| | NEHLGLLGPYIRAEV | TTATGATGATACCATATCAGTTGAAATGAAGAAGGAAGATTTT |
| | EDNIMVTFRNQASRP | GACATTTATGATGAGGATGAAAATCAGAGCCCCCGCAGCTTTC |
| | YSFYSSLISYEEDQRQ | AAAAGAAAACACGACACTATTTTATTGCTGCAGTGGAGAGGC |
| | GAEPRKNFVKPNETK | TCTGGGATTATGGGATGAGTAGCTCCCCACATGTTCTAAGAAA |
| | TYFWKVQHHMAPTK | CAGGGCTCAGAGTGGCAGTGTCCCTCAGTTCAAGAAAGTTGTT |
| | DEFDCKAWAYFSDV | TTCCAGGAATTTACTGATGGCTCCTTTACTCAGCCCTTATACCG |
| | DLEKDVHSGLIGPLL | TGGAGAACTAAATGAACATTTGGGACTCCTGGGGCCATATATA |
| | VCHTNTLNPAHGRQ | AGAGCAGAAGTTGAAGATAATATCATGGTAACTTTCAGAAAT |
| | VTVQEFALFFTIFDET | CAGGCCTCTCGTCCCTATTCCTTCTATTCTAGCCTTATTTCTTAT |
| | KSWYFTENMERNCR | GAGGAAGATCAGAGGCAAGGAGCAGAACCTAGAAAAAACTTT |
| | APCNIQMEDPTFKEN | GTCAAGCCTAATGAAACCAAAACTTACTTTTGGAAAGTGCAAC |
| | YRFHAINGYIMDTLP | ATCATATGGCACCCACTAAAGATGAGTTTGACTGCAAAGCCTG |
| | GLVMAQDQRIRWYL | GGCTTATTTCTCTGATGTTGACCTGGAAAAAGATGTGCACTCA |
| | LSMGSNENIHSIHFSG | GGCCTGATTGGACCCCTTCTGGTCTGCCACACTAACACACTGA |
| | HVFTVRKKEEYKMA | ACCCTGCTCATGGGAGACAAGTGACAGTACAGGAATTTGCTCT |
| | LYNLYPGVFETVEML | GTTTTTCACCATCTTTGATGAGACCAAAAGCTGGTACTTCACT |
| | PSKAGIWRVECLIGE | GAAAATATGGAAAGAAACTGCAGGGCTCCCTGCAATATCCAG |
| | HLHAGMSTLFLVYSN | ATGGAAGATCCCACTTTTAAAGAGAATTATCGCTTCCATGCAA |
| | KCQTPLGMASGHIRD | TCAATGGCTACATAATGGATACACTACCTGGCTTAGTAATGGC |
| | FQITASGQYGQWAPK | TCAGGATCAAAGGATTCGATGGTATCTGCTCAGCATGGGCAGC |
| | LARLHYSGSINAWST | AATGAAAACATCCATTCTATTCATTTCAGTGGACATGTGTTCA |
| | KEPFSWIKVDLLAPMI | CTGTACGAAAAAAAGAGGAGTATAAAATGGCACTGTACAATC |
| | IHGIKTQGARQKFSSL | TCTATCCAGGTGTTTTTGAGACAGTGGAAATGTTACCATCCAA |
| | YISQFIIMYSLDGKKW | AGCTGGAATTTGGCGGGTGGAATGCCTTATTGGCGAGCATCTA |
| | QTYRGNSTGTLMVFF | CATGCTGGGATGAGCACACTTTTTCTGGTGTACAGCAATAAGT |
| | GNVDSSGIKHNIFNPP | GTCAGACTCCCCTGGGAATGGCTTCTGGACACATTAGAGATTT |
| | IIARYIRLHPTHYSIRS | TCAGATTACAGCTTCAGGACAATATGGACAGTGGGCCCCAAA |
| | TLRMELMGCDLNSCS | GCTGGCCAGACTTCATTATTCCGGATCAATCAATGCCTGGAGC |
| | MPLGMESKAISDAQI | ACCAAGGAGCCCTTTTCTTGGATCAAGGTGGATCTGTTGGCAC |
| | TASSYFTNMFATWSP | CAATGATTATTCACGGCATCAAGACCCAGGGTGCCCGTCAGAA |
| | SKARLHLQGRSNAW | GTTCTCCAGCCTCTACATCTCTCAGTTTATCATCATGTATAGTC |
| | RPQVNNPKEWLQVD | TTGATGGGAAGAAGTGGCAGACTTATCGAGGAAATTCCACTG |
| | FQKTMKVTGVTTQG | GAACCTTAATGGTCTTCTTTGGCAATGTGGATTCATCTGGGAT |
| | VKSLLTSMYVKEFLIS | AAAACACAATATTTTTAACCCTCCAATTATTGCTCGATACATC |
| | SSQDGHQWTLFFQNG | CGTTTGCACCCAACTCATTATAGCATTCGCAGCACTCTTCGCAT |
| | KVKVFQGNQDSFTPV | GGAGTTGATGGGCTGTGATTTAAATAGTTGCAGCATGCCATTG |
| | VNSLDPPLLTRYLRIH | GGAATGGAGAGTAAAGCAATATCAGATGCACAGATTACTGCT |
| | PQSWVHQIALRMEVL | TCATCCTACTTTACCAATATGTTTGCCACCTGGTCTCCTTCAAA |
| | GCEAQDLYGAGSPG | AGCTCGACTTCACCTCCAAGGGAGGAGTAATGCCTGGAGACCT |
| | AETAPGASPGTSSTGS | CAGGTGAATAATCCAAAAGAGTGGCTGCAAGTGGACTTCCAG |
| | PGASPGTSSTGSPGTP | AAGACAATGAAAGTCACAGGAGTAACTACTCAGGGAGTAAAA |
| | GSGTASSSPGSSTPSG | TCTCTGCTTACCAGCATGTATGTGAAGGAGTTCCTCATCTCCA |
| | ATGSPGTPGSGTASSS | GCAGTCAAGATGGCCATCAGTGGACTCTCTTTTTTCAGAATGG |
| | PGSSTPSGATGSPGTP | CAAAGTAAAGGTTTTTCAGGGAAATCAAGACTCCTTCACACCT |
| | GSGTASSSPGSSTPSG | GTGGTGAACTCTCTAGACCCACCGTTACTGACTCGCTACCTTC |
| | ATGSPGSSTPSGATGS | GAATTCACCCCCAGAGTTGGGTGCACCAGATTGCCCTGAGGAT |
| | PGSSPSASTGTGPGSS | GGAGGTTCTGGGCTGCGAGGCACAGGACCTCTACGGCGCCGG |
| | PSASTGTGPGASPGTS | ATCACCTGGGGCCGAAACGGCCCCGGGAGCGTCACCCGGTAC |
| | STGSPGTPGSGTASSS | GTCCTCAACGGGGAGCCCTGGGGCATCACCCGGCACGTCCTCG |
| | PGSSTPSGATGSPGSS | ACAGGGTCCCCCGGAACACCGGGTTCGGGGACTGCGTCGTCGT |
| | PSASTGTGPGSSPSAS | CACCCGGTTCGTCAACACCCAGCGGTGCGACGGGTTCCCCGGG |
| | TGTGPGASPGTSSTGS | AACCCCCGGATCAGGAACAGCGTCGTCGAGCCCCGGAAGCTC |
| | PGASPGTSSTGSPGSS | GACCCCGTCAGGAGCGACCGGGTCGCCAGGAACGCCTGGGTC |
| | TPSGATGSPGSSPSAS | GGGTACTGCCTCATCGTCGCCGGGTTCATCGACGCCCTCCGGA |
| | TGTGPGASPGTSSTGS | GCAACAGGTTCACCCGGGTCGTCCACCCCCAGCGGAGCGACT |
| | PGSSPSASTGTGPGTP | GGATCACCGGGATCGAGCCCGTCGGCATCGACAGGAACAGGT |
| | GSGTASSSPGSSTPSG | CCCGGTAGCTCCCCATCGGCCTCCACGGGGACGGGGCCTGGTG |
| | ATGSGAETAEQKLISE | CGTCACCGGGGACAAGCAGCACGGGTTCGCCGGGAACGCCAG |
| | EDLSPATG | GGTCAGGGACCGCGTCGTCGAGCCCAGGGTCGTCCACCCCAA |
| | | GCGGGGCTACTGGGTCCCCGGGTAGCTCGCCGAGCGCATCAA |
| | | CGGGAACCGGACCGGGCAGCTCCCCCTCAGCGTCGACAGGGA |
| | | CAGGCCCTGGCGCGAGCCCGGGAACATCGTCGACGGGGTCAC |
| | | CCGGAGCATCGCCAGGGACCTCGTCAACTGGCTCGCCTGGATC |
| | | GTCAACGCCCTCGGGAGCCACGGGGTCGCCCGGATCATCCCCG |
| | | TCCGCCTCAACTGGCACAGGCCCTGGTGCTTCCCCTGGAACGT |
| | | CCAGCACAGGCTCCCCCGGTTCCAGCCCTTCCGCTTCGACTGG |
| | | GACTGGACCCGGAACCCCGGGATCGGGGACAGCGTCAAGCTC |
| | | GCCCGGAAGCTCCACGCCTTCGGGGGCAACCGGGTCAGGGGC |
| | | CGAAACGGCCGAACAAAAACTCATCTCAGAAGAGGATCTGTC |
| | | ACCTGCAACCGGTTGA |

### Example 21

### Transfection of Mammalian Cells, Expression of FVIII-XTEN and Assessment of FVIII Activity

[0624] Mammalian cells, including but not limited to CHO, BHK, COS, and HEK293, are suitable for transformation with the vectors of the Examples, above, in order to express and recover FVIII-XTEN fusion protein. The following are details for methods used to express BDD FVIII and FVIII-XTEN fusion protein constructs pBC0114, pBC0135, pBC0136, pBC0137, pBC0145, pBC0146, and pBC0149 by transient transfection, which includes electroporation and chemical (PEI) transfection methods.

[0625] Adherent HEK293 cells purchased from ATCC were revived in medium of vendor's recommendation and passaged for a few generations before multiple vials were frozen in the medium with 5% DMSO. One vial was revived and passaged one more time before transfection. The HEK293 cells were plated 1-2 days before transfection at a density of approximately 7×10⁵ per ml in one T175 per transfection, using 35 ml medium. On the day of transfection the cells were trypsinized, detached and counted, then rinsed in the medium until an even cell suspension was achieved. The cells were counted and an appropriate volume of cells (based on cell count above) were transferred to 50 mL centrifuge tube, such that there were approximately 4×10⁶ cells per transfection. Cells were centrifuged for 5 min at 500 RCF, the supernatant discarded, and the cells resuspended in 10 ml of D-PBS.

[0626] Electroporation: For electroporation, an appropriate volume of resuspension buffer was added using a micropipette (supplied in the Neon™ Transfection System 100 μL Kit), such that 110 μl of buffer was available per transfection. Separate volumes of 110 μl of cell suspension were added to each Eppendorf tube containing 11 μL1 of plasmid DNA for each of the individual FVIII-XTEN constructs for a total of 6 μg (volume of DNA may be less, qs to 11 ul with sterile H2O). A Neon™ Transfection Device was used for transfection. The program was set to electroporate at 1100 v for a pulse width of 20 ms, for a total of two pulses. A Neon™ Tube (supplied in the Neon™ Transfection System 100 μL Kit) was placed into Neon™ Pipette Station. A volume of 3 mL of Electrolytic Buffer E2 (supplied in the Neon™ Transfection System 100 μL Kit) was added to the Neon™ Tube. Neon™ Pipettes and 100 μl Neon™ Tips were used to electroporate 100 μl of cell-plasmid DNA mixture using the Neon™ Pipette Station. The electroporation was executed and when complete, the Neon™ Pipette was removed from the Station and the pipette with the transfected cells was used to transfer the cells, with a circular motion, into a 100 mm×20 mm petri plate containing 10 ml of Opti-MEM I Reduced-Serum Medium (1×, Invitrogen), such that transfected cells were evenly distributed on plate. The cells for each transfection were incubated at 37° C. for expression. On day 3 post-transfection, a 10% volume of salt solution of 10 mM Hepes, 5 mM CaCl₂, and 4M NaCl was added to each cell culture and gently mixed for 30 minutes. Each cell culture was transferred to a 50 ml conical centrifuge tube and was centrifuged at 3000 rpm for 10 minutes at 4° C. The supernatants for each culture were placed into a new 50 ml conical tube and then split into aliquots of 5×1 ml in Eppendorf and 2×15 ml conical tubes for assay or were flash frozen before testing for expression of FVIII-XTEN in ELISA and performance in an FVIII activity assay, as described herein.

[0627] Chemical transfection: Chemical transfection can be accomplished using standard methods known in the art. In the present Example, PEI is utilized, as described.

[0628] Suspension 293 Cells are seeded the day before transfection at 7×10⁵ cells/mL in sufficient Freestyle 293 (Invitrogen) medium to provide at least 30 ml working volume, and incubated at 37° C. On the day of transfection, an aliquot of 1.5 ml of the transfection medium is held at room temperature, to which 90 μL of 1 mg/ml PEI is added and vortexed briefly. A volume of 30 μl of DNA encoding the FVIII-XTEN_AE288 construct (concentration of 1 mg/ml) is added to the PEI solution, which is vortexed for 30 sec. The mixture is held at room temperature for 5-15 min. The DNA/PEI mixture is added to the HEK293 cells and the suspension is incubated at 37° C. using pre-established shake flask conditions. About four hours after the addition of the DNA/PEI mix, a 1× volume of expansion media is added and the cells incubated at 37° C. for 5 days. On the day of harvest, a 10% volume of salt solution of 10 mM Hepes, 5 mM CaCl₂, and 4M NaCl is added to the cell culture and gently mixed for 30 minutes. The cell culture is transferred to a 50 ml conical centrifuge tube and is centrifuged at 4000 rpm for 10 minutes at 4° C. The supernatant is placed into a new 50 ml conical tube and then split into aliquots of 5×1 ml in Eppendorf and 2×15 ml conical tubes for assay or are flash frozen before testing for expression of FVIII-XTEN in ELISA and/or performance in an FVIII activity assay, as described herein.

[0629] Assay of Expressed FVIII by ELISA

[0630] To verify and quantitate the expression of FVIII-XTEN fusion proteins of the constructs by cell culture, an ELISA assay was established. Capture antibodies, either SAF8C-AP (Affinity Biologicals), or GMA-8002 (Green Mountain Antibodies) were immobilized onto wells of an ELISA plate. The wells were then incubated with blocking buffer (1×PBS/3% BSA) to prevent non-specific binding of other proteins to the anti-FVIII antibody. FVIII standard dilutions (−50 ng-0.024 ng range), quality controls, and cell culture media samples were then incubated for 1.5 h in the wells to allow binding of the expressed FVIII protein to the coated antibody. Wells were then washed extensively, and bound protein is incubated with anti-FVIII detection antibody, SAF8C-Biotinylated (Affinity Biologicals). Then streptavidin-HRP, which binds the biotin conjugated to the FVIII detection antibody, is added to the well and incubated for 1 h. Finally, OPD substrate is added to the wells and its hydrolysis by HRP enzyme is monitored with a plate reader at 490 nm wavelength. Concentrations of FVIII-containing samples were then calculated by comparing the colorimetric response at each culture dilution to a standard curve. The results, in Table 15, below, show that FVIII-XTEN of the various constructs are expressed at 0.4-1 μg/ml in the cell culture media. The results obtained by ELISA and the activity data indicate that FVIII-XTEN fusion proteins were very well expressed using the described transfection methods. Furthermore, under the experimental conditions, the results demonstrate that the specific activity values of the FVIII-XTEN proteins were similar or greater than that of pBC0114 base construct (expressing BDD FVIII) and support that XTEN insertion into the C-terminus or B-domain of FVIII results in preservation of FVIII protein function.

[0631] Activity Assay for CFXTEN Fusion Protein of FVIII BDD Linked to XTEN

[0632] BDD FVIII and FVIII-XTEN fusion protein constructs pBC0114, pBC0135, pBC0136, pBC0137, pBC0145, pBC0146, and pBC0149, in various configurations, including XTEN_AE288 and AG288 inserted at the C-terminus of the FVIII BDD sequence and FVIII-XTEN fusion proteins with AE42 and AE288 inserted after residue 745 (or residue 743) and before residue 1640 (or residue 1638) of the B-domain (including constructs with the P1648 processing site mutated to alanine), were expressed in transiently transfected Freestyle 293 cells, as described above, and tested for procoagulant activity. The procoagulant activity of each of the FVIII-XTEN proteins present in cell culture medium was assessed using a Chromogenix Coamatic® Factor VIII assay, an assay in which the activation of factor X was linearly related to the amount of factor VIII in the sample. The assay was performed according to manufacturer's instructions using the end-point method, which was measured spectrophotometrically at OD405 nm A standard curve was created using purified FVIII protein at concentrations of 250, 200, 150, 100, 75, 50, 37.5, 25, 12.5, 6.25, 3.125 and 1.56 mU/ml. Dilutions of factor VIII standard, quality controls, and samples were prepared with assay buffer and PEI culture medium to account for the effect of the medium in the assay performance. Positive controls consist of purified factor VIII protein at 20, 40, and 80 mU/ml concentrations and cell culture medium of pBC0114 FVIII base construct, lacking the XTEN insertions. Negative controls consisted of assay buffer or PEI culture medium alone. The cell culture media of the FVIII-XTEN constructs were obtained as described, above, and were tested in replicates at 1:50, 1:150, and 1:450 dilutions and the activity of each was calculated in U/ml. Each FVIII-XTEN construct exhibited procoagulant activity that was at least comparable, and in some cases greater than that of the base construct positive control, and support that under the conditions of the experiments, the linkage of XTEN, including AE288 or AG288, at the C-terminus of FVIII or insertion of XTEN, including AE42 or AE288 within the B-domain resulted in retention or even enhancement of FVIII procoagulant activity,

TABLE 15
Results of ELISA and Chromogenix FVIII activity assays

| FVIII- | | | | |
|---|---|---|---|---|
| XTEN | Activity | Concentration | Specific Activity | |
| Construct | (IU/ml) | (μg/ml) | (IU/mg) | Description of Construct |
| pBC0114 | 3.0 | 0.6 | 5000 | BDD FVIII base construct used for |
| | | | | XTEN insertions |
| pBC0146 | 7.4 | 0.6 | 12759 | FVIII construct with XTEN AG288 |
| | | | | inserted at the C-terminus of FVIII |
| pBC0145 | 3.1 | 0.6 | 4844 | FVIII construct with XTEN AE288 |
| | | | | inserted at the C-terminus of FVIII |
| pBC0135 | 4.0 | 1.0 | 4124 | FVIII construct with XTEN AE42 |
| | | | | inserted between residue 745 and 1640 |
| pBC0149 | 4.9 | 0.9 | 5581 | FVIII construct with XTEN AE42 |
| | | | | inserted between residue 745 and 1640 |
| | | | | and with Arg1648 to Ala mutation |
| pBC0136 | 2.7 | 0.4 | 7670 | FVIII construct with XTEN AE288 |
| | | | | inserted between residue 745 and 1640 |
| pBC0137 | 1.9 | 0.3 | 6013 | FVIII construct with XTEN AE288 |
| | | | | inserted between residue 745 and 1640 |
| | | | | and with Arg1648 to Ala mutation |

[0633] Generation of Stable Pools and Cell Lines that Produce FVIII-XTEN

[0634] Stable pools are generated by culturing transfected cells for 3-5 weeks in medium containing selection antibiotics such as puromycin, with medium change every 2-3 days. Stable cells can be used for either production or generation of stable clones. For stable cell line selection during primary screening, cells from stable pools either from on-going passaging or revived from frozen vials are seeded in 96-well plates at a target density of 0.5 cell/well. About 1 week after seeding spent medium from wells with single cell cluster as observed under microscope are tested for expression of FVIII by activity assay or antigen measurement.

[0635] For additional rounds of screening, normalized numbers of cells are seeded in multi-well plates. Spent medium is harvested and tested for FVIII concentration by ELISA and FVIII activity assay. Cells would also be harvested from the plates and counted using Vi-Cell. Clones are ranked by (1) FVIII titers according to ELISA and activity; (2) ratios of ELISA titer/cell count and activity titer/cell count; and (3) integrity and homogeneity of products produced by the clones as measured by Western blots. A number of clones for each of the constructs are selected from the primary screening for additional rounds of screening.

[0636] For the second round of screening, cells in 96-well plates for the top clones selected from primary screening are first expanded in T25 flasks and then seeded in duplicate 24-well plates. Spent medium is collected from the plates for FVIII activity and antigen quantification and cells harvested and counted by Vi-Cell. Clones are ranked and then selected according to titers by ELISA and activity assay, ELISA titer/cell and activity titer/cell count ratios. Frozen vials are prepared for at least 5-10 clones and again these clones were screened and ranked according to titers by ELISA and activity, and ratios of ELISA titer/cell count and activity titer/cell count, and product integrity and homogeneity by Western blot, and 2-3 clones are selected for productivity evaluation in shake flasks. Final clones are selected based on specific productivity and product quality.

[0637] Production of FVIII-XTEN Secreted in Cell Culture Medium by Suspension 293 Stable Clones

[0638] HEK293 stable cell clones selected by the foregoing methods are seeded in shake flasks at 1−2×10⁵ cells/ml in expression medium. Cell count, cell viability, FVIII activity and antigen expression titers are monitored daily. On the day when FVIII activity and antigen titers and product quality are optimal, the culture is harvested by either centrifugation/sterile filtration or depth filtration/sterile filtration. The filtrate is either used immediately for tangential flow filtration (TFF) processing and purification or stored in −80° C. freezer for TFF processing and purification later.

### Example 22

### Purification and Characterization of CFXTEN Constructs

[0639] Purification of FVII-XTEN_AE864 by FVIII Affinity Chromatography

[0640] CFXTEN containing supernatant is filtered using a Cuno ZetaPlus Biocap filter and a Cuno BioAssure capsule and subsequently concentrated by tangential flow filtration using a Millipore Pellicon 2 Mini cartridge with a 30,000 Da MWCO. Using the same tangential flow filtration cartridge the sample is diafiltered into 10 mM histidine, 20 mM calcium chloride, 300 mM sodium chloride, and 0.02% Tween 80 at pH 7.0. FVIIISelect resin (GE 17-5450-01) selectively binds FVIII or B domain deleted FVIII using a 13 kDa recombinant protein ligand coupled to a chromatography resin. The resin is equilibrated with 10 mM histidine, 20 mM calcium chloride, 300 mM sodium chloride, and 0.02% Tween 80 at pH 7.0 and the supernatant loaded. The column is washed with 20 mM histidine, 20 mM calcium chloride, 300 mM sodium chloride, and 0.02% Tween 80 at pH 6.5, then is washed with 20 mM histidine, 20 mM calcium chloride, 1.0 M sodium chloride, and 0.02% Tween 80 at pH 6.5, and eluted with 20 mM histidine, 20 mM calcium chloride, 1.5 M sodium chloride, and 0.02% Tween 80 dissolved in 50% ethylene glycol at pH 6.5.

[0641] Concentration and Buffer Exchange by Tangential Flow Filtration and Diafiltration

[0642] Supernatant batches totaling at least 10 L in volume, from stable CHO cells lines expressing CFXTEN are filtered using a Cuno ZetaPlus Biocap filter and a Cuno BioAssure capsule. They are subsequently concentrated approximately 20-fold by tangential flow filtration using a Millipore Pellicon 2 Mini cartridge with a 30,000 Da MWCO. Using the same tangential flow filtration cartridge the sample is diafiltered with 10 mM histidine, 20 mM calcium chloride, 300 mM sodium chloride, and 0.02% Tween 80 at pH 7.0 10 mM tris pH 7.5, 1 mM EDTA with 5 volumes worth of buffer exchange. Samples are divided into 50 ml aliquots and frozen at −80° C.

[0643] Purification of CFXTEN by Anion Exchange Chromatography

[0644] Using an Akta FPLC system the sample is purified using a SuperQ-650M column. The column is equilibrated into buffer A (0.02 mol/L imidazole, 0.02 mol/L glycine ethylester hydrochloride, 0.1 5 mol/L, NaCl, 2.5% glycerol, pH 6.9) and the sample loaded. The sample is eluted using buffer B (5 mmol/L histidine HCl (His/HCl), 1.15 mol/L NaCl, pH 6.0). The 215 nm chromatogram is used to monitor the elution profile. The eluted fractions are assayed for FVIII by ELISA, SDS-PAGE or activity assay. Peak fractions are pooled and stored or subjected to thrombin activation immediately (O'Brien et al., Blood (1990) 75:1664-1672). Fractions are assayed for FVIII activity using an aPTT based factor assay. A Bradford assay is performed to determine the total amount of protein in the load and elution fractions.

[0645] Purification of CFXTEN by Hydrophobic Interaction Chromatography

[0646] CFXTEN samples in Buffer A (50 mmol/histidine, 1 mmol/CaCl₂, 1 M NaCl, and 0.2 g/l Tween 80®, pH 6.8) are loaded onto a toyopearl ether 650M resin equilibrated in Buffer A. The column is washed with 10 column volumes of Buffer A to remove DNA, incorrectly folded forms and FVIII, and other contaminant proteins. The CFXTEN is eluted with Buffer B (25 mmol/l histidine, 0 5 mmol/CaCl₂ and 0.4 mol/l NaCl, pH 6.8) as a single step elution (U.S. Pat. No. 6,005,082). Fractions are assayed for FVIII activity using an aPTT based factor assay. A Bradford assay is performed to determine the total amount of protein in the load and elution fractions.

[0647] Removal of Aggregated Protein from Monomeric CFXTEN with Anion Exchange Chromatography

[0648] Using an Akta FPLC system the sample is purified using a macrocap Q column. The column is equilibrated into buffer A (20 mM MES, 1 mM CaCl₂, pH 6.0) and the sample is loaded. The sample is eluted using a linear gradient of 30% to 80% buffer B (20 mM MES, 1 mM CaCl₂, pH 6.0+500 mM NaCl) over 20 column volumes. The 215 nm chromatogram is used to monitor the elution profile. The fractions corresponding to the early portion of the elution contain primarily monomeric protein, while the late portion of the elution contains primarily the aggregated species. Fractions from the macrocapQ column is analyzed via size exclusion chromatography with 60 cm BioSep G4000 column to determine which to pool to create an aggregate free sample.

[0649] Activation of FVIII by Thrombin

[0650] Purified FVIII in 5 mmol/L histidine HCl (His/HCl), 1.15 mol/L NaCl, pH 6.0 is treated with thrombin at a 1:4 ratio of units of human thrombin to units FVIII, and the sample is incubated at 37° C. for up to 2 hours. To monitor the activation process, aliquots of this sample are then withdrawn, and acetone precipitated by the addition of 4.5 vol ice-cold acetone. The sample is incubated on ice for 10 minutes, and the precipitate is collected by centrifugation at 13,000 g in a microfuge for 3 minutes. The acetone is removed, and the precipitate is resuspended in 30 μL SDS-PAGE reducing sample buffer and boiled for 2 minutes. Samples are then assayed by SDS-PAGE or western blot. The conversion of FVIII to FVIIIa is examined by looking for the conversion of the heavy chain into 40 and 50 kDa fragments and the conversion of the light chain into a 70 kDa fragment (O'Brien et al., Blood (1990) 75:1664-1672).

[0651] SEC Analysis of CFXTEN

[0652] FVII-XTEN purified by affinity and anion exchange chromatography is analyzed by size exclusion chromatography with 60 cm BioSep G4000 column. A monodispersed population with a hydrodynamic radius of ˜10 nm/apparent MW of ˜1.7 MDa (XTEN-288 fusion) or ˜12 nm/an apparent MW of 5.3 MDa (XTEN-864 fusion) is indicative of an aggregation-free sample. CFXTEN is expected to have an apparent molecular weight factor up to or about 8 (for an XTEN-288 fusion with FVIII) or up to or about ˜15 (for an XTEN-864 fusion with FVIII).

[0653] ELISA based Concentration Determination of CFXTEN

[0654] The quantitative determination of factor VIII/CFXTEN antigen concentrations using the double antibody enzyme linked immuno-sorbent assay (ELISA) is performed using proven antibody pairings (VisuLize™ FVIII Antigen kit, Affinity Biologicals, Ontario Canada). Strip wells are pre-coated with sheep polyclonal antibody to human FVIII. Plasma samples are diluted and applied to the wells. The FVIII antigen that is present binds to the coated antibody. After washing away unbound material, peroxidase-labeled sheep detecting antibody is applied and allowed to bind to the captured FVIII. The wells are again washed and a solution of TMB (the peroxidase substrate tetramethylbenzidine) is applied and allowed to react for a fixed period of time. A blue color develops which changes to yellow upon quenching the reaction with acid. The color formed is measured spectrophotometrically in a microplate reader at 450 nm The absorbance at 450 nm is directly proportional to the quantity of FVIII antigen captured onto the well. The assay is calibrated using either the calibrator plasma provided in the kit or by substituting a CFXTEN standard in an appropriate matrix.

[0655] Assessment of CFXTEN Activity Via a FXa Coupled Chromogenic Substrate Assay

[0656] Using the Chromogenix Coamatic Factor VIII (Chromogenix, cat#82258563) the activity of FVIII is assessed as follows. In the presence of calcium ions and phospholipids, factor X is activated to factor Xa by factor IXa. This activation is greatly stimulated by factor VIII which acts as a cofactor in this reaction. By using optimal amounts of Ca²⁺, phospholipid and factor IXa, and an excess of factor X, the rate of activation of factor X is linearly related to the amount of factor VIII. Factor Xa hydrolyses the chromogenic substrate S-2765 thus liberating the chromophoric group, pNA. The color is then read spectrophotometrically at 405 nm The generated factor Xa and thus the intensity of color is proportional to the factor VIII activity in the sample. Hydrolysis of S-2765 by thrombin formed is prevented by the addition of the synthetic thrombin inhibitor 1-2581 together with the substrate. The activity of an unknown sample is determined by comparing final A405 of that sample to those from a standard curve constructed from known FVIII amounts. By also determining the amount of FVIII antigen present in the samples (via A280 or ELISA), a specific activity of a sample is determine to understand the relative potency of a particular preparation of FVIII. This enables the relative efficiency of different isolation strategies or construct designs for CFXTEN fusions to be assessed for activity and ranked.

[0657] aPTT Based Assays for CFXTEN Activity Determination

[0658] CFXTEN acts to replace FVIII in the intrinsic or contact activated coagulation pathway. The activity of this coagulation pathway is assessed using an activated partial thromboplastin time assay (aPTT). FVIII activity specifically is measured as follows: a standard curve is prepared by diluting normal control plasma (Pacific Hemostasis cat#100595) two-fold with FVIII deficient plasma (cat#100800) and then conducting 6.4-fold serial dilutions again with factor VIII deficient plasma. This creates a standard curve with points at 500, 130, 31, 7.8, 2.0, 0.5 and 0.1 IU/ml of activity, where one unit of activity is defined as the amount of FVIIIC activity in 1 ml of normal human plasma. A FVIII-deficient plasma also is included to determine the background level of activity in the null plasma. The sample is prepared by adding CFXTEN to FVIII deficient plasma at a ratio of 1:10 by volume. The samples is tested using an aPTT assay as follows. The samples are incubated at 37 C in a molecular devices plate reader spectrophotometer for 2 minutes at which point an equal volume of aPTT reagent (Pacific Hemostasis cat#100402) is added and an additional 3 minute 37 C incubation performed. After the incubation the assay is activated by adding one volume of calcium chloride (Pacific Hemostasis cat#100304). The turbidity is monitored at 450 nm for 5 minutes to create reaction profiles. The aPTT time, or time to onset of clotting activity, is defined as the first time where OD405 nm increased by 0.06 over baseline. A log-linear standard curve is created with the log of activity relating linearly to the aPTT time. From this the activity of the sample in the plate well is determined and then the activity in the sample is determined by multiplying by 11 to account for the dilution into the FVIII deficient plasma. By also determining the amount of FVIII antigen present in the samples (via A280 or ELISA), a specific activity of a sample can be determine to understand the relative potency of a particular preparation of FVIII. This enables the relative efficiency of different isolation strategies or construct designs for CFXTEN fusions to be ranked.

[0659] Western Blot Analysis of FVIII/FVIII-XTEN Expressed Proteins

[0660] Samples were run on a 8% homogeneous SDS gel and subsequently transferred to PVDF membrane. The samples in lanes 1-15 were: MW Standards, FVIII (42.5 ng), pBC0100B, pBC0114A, pBC0100, pBC0114, pBC0126, pBC0127 (8/5/11; #9), pBC0128, pBC0135, pBC0136, pBC0137, pBC0145, pBC0149, and pBC0146, respectively. The membrane was initially blocked with 5% milk then probed with anti-FVIII monoclonal antibody, GMA-012, specific to the A2 domain of the heavy chain (Ansong C, Miles S M, Fay P J. J Thromb Haemost. 2006 April; 4(4):842-7). Insertion of XTEN288 in the B-domain was observed for pBC0136 (lane 8, FIG. 20) and pBC0137 (lane 9, FIG. 20), whereas XTEN288 insertion at the C-terminus was observed for pBC0146 (lane 12, FIG. 20). All of the assayed FVIII-XTEN proteins revealed the presence of single chain protein with molecular weight of at least 21 kDa higher than that of pBC0114 base construct or FVIII standard. In addition, AE42 insertion was observed for pBC0135 (lane 7, FIG. 20) and pBC0149 (lane 11, FIG. 20) with the single chain running ˜5 kDa higher than that of pBC0114 base protein and heavy chain running at ˜5 kDa higher than 90 kDa band of the base protein.

### Example 23

### Pharmacokinetic Analysis of CFXTEN Fusion Polypeptides in Rats

[0661] The pharmacokinetics of various CFXTEN fusion proteins, compared to FVIII alone, are tested in Sprague-Dawley rats. CFXTEN and FVIII are administered to female Sprague-Dawley rats (n=3) IV through a jugular vein catheter at 3-10 μg/rat. Blood samples (0.2 mL) are collected into pre-chilled heparinized tubes at predose, 0.08, 0.5, 1, 2, 4, 8, 24, 48, 72 hour time points, and processed into plasma. Quantitation of the test articles is performed by ELISA assay using an anti-FVIII antibody for both capture and detection. A non-compartmental analysis is performed in WinNonLin with all time points included in the fit to determine the PK parameters. Results are expected to show increased terminal half-life and area under the curve, and a reduced volume of distribution for the CFXEN compared to FVIII alone, and the results are used in conjunction with results from coagulation and pharmacodynamic assays to select those fusion protein configurations with desired properties.

### Example 24

### Pharmacodynamic Evaluation of CFXTEN in Animal Models

[0662] The in vivo pharmacologic activity of CFXTEN fusion proteins are assessed using a variety of preclinical models of bleeding including but not limited to those of hemophilia, surgery, trauma, thrombocytopenia/platelet dysfunction, clopidogrel/heparin-induced bleeding and hydrodynamic injection. These models are developed in multiple species including mice, rat, rabbits, and dogs using methods equivalent to those used and published for other FVIII approaches. CFXTEN compositions are provided in an aqueous buffer compatible with in vivo administration (for example: phosphate-buffered saline or Tris-buffered saline). The compositions are administered at appropriate doses, dosing frequency, dosing schedule and route of administration as optimized for the particular model. Efficacy determinations include measurement of FVIII activity, one-stage clotting assay, FVIII chromogenic assay, activated partial prothrombin time (aPTT), bleeding time, whole blood clotting time (WBCT), thrombelastography (TEG or ROTEM), among others.

[0663] In one example of a PD model, CFXTEN and FVIII are administered to genetically-deficient or experimentally-induced HemA mice. At various time points post-administration, levels of FVIII and CFXTEN are measured by ELISA, activity of FVIII and CFXTEN is measured by commercially-available FVIII activity kits and clotting time is measured by aPTT assay. Overall, the results can indicate that the CFXTEN constructs may be more efficacious at inhibiting bleeding as compared to FVIII and/or equivalent in potency to comparable dosage of FVIII with less frequent or more convenient dosing intervals.

[0664] In a mouse bleeding challenge PD model CFXTEN and FVIII are administered to genetically-deficient or experimentally-induced HemA mice and effect on hemostatic challenge is measured. Hemostatic challenge can include tail transaction challenge, hemarthropthy challenge, joint bleeding or saphenous vein challenge among others. At various time points post-administration levels of FVIII and CFXTEN are measured by ELISA, activity of FVIII and CFXTEN are measured by commercially available FVIII activity kit, bleeding time is measured and clotting time is measured by aPTT assay. Overall the results are expected to indicate that the CFXTEN constructs are more efficacious at inhibiting bleeding as compared to FVIII and/or equivalent in potency to comparable dosage of FVIII with less frequent or more convenient dosing intervals, and the results are used in conjunction with results from coagulation and other assays to select those fusion protein configurations with desired properties.

[0665] In a dog PD model, CFXTEN and FVIII are administered to genetically-deficient hemophiliac dogs. At various time points post administration, levels of FVIII and CFXTEN are measured by ELISA, activity of FVIII and CFXTEN are measured by commercially available FVIII activity kit and clotting time is measured by aPTT assay. Overall the results indicates that the CFXTEN constructs may be more efficacious at inhibiting bleeding as compared to FVIII and/or equivalent in potency to comparable dosage of FVIII with less frequent or more convenient dosing, and the results are used in conjunction with results from coagulation and other assays to select those fusion protein configurations with desired properties.

[0666] In a dog bleeding challenge PD model CFXTEN and FVIII are administered to genetically deficient hemophiliac dogs and effect on hemostatic challenge is measured. Hemostatic challenge includes cuticle bleeding time among others. At various time points post-administration levels of FVIII and CFXTEN are measured by ELISA, activity of FVIII and CFXTEN are measured by commercially available FVIII activity kit, bleeding time is measured and clotting time are measured by aPTT assay. Overall the results indicate that the CFXTEN constructs may be more efficacious at inhibiting bleeding as compared to FVIII and/or equivalent in potency to comparable dosage of FVIII with less frequent or more convenient dosing intervals, and the results are used in conjunction with results from coagulation and other assays to select those fusion protein configurations with desired properties.

[0667] Additional preclinical models of bleeding include but are not limited to those of hemophilia, surgery, trauma, thrombocytopenia/platelet dysfunction, clopidogrel/heparin-induced bleeding and hydrodynamic injection. These models can developed in multiple species including mice, rat, rabbits, and dogs using methods equivalent to those used and published for other FVIII approaches. Overall the results indicate that the CFXTEN constructs may be more efficacious at inhibiting bleeding as compared to FVIII and/or equivalent in potency to comparable dosage of FVIII with less frequent or more convenient dosing intervals, and the results are used in conjunction with results from coagulation and other assays to select those fusion protein configurations with desired properties.

### Example 25

### CFXTEN with Cleavage Sequences

[0668] C-Terminal XTEN Releasable by FXIa

[0669] A CFXTEN fusion protein consisting of an XTEN protein fused to the C-terminus of FVIII is created with an XTEN release site cleavage sequence placed in between the FVIII and XTEN components, as depicted in FIG. 10. Exemplary sequences are provided in Table 30. In this case, the release site cleavage sequence is incorporated into the CFXTEN that contains an amino acid sequence that is recognized and cleaved by the FXIa protease (EC 3.4.21.27, Uniprot P03951). Specifically the amino acid sequence KLTRAET is cut after the arginine of the sequence by FXIa protease. FXI is the procoagulant protease located immediately before FVIII in the intrinsic or contact activated coagulation pathway. Active FXIa is produced from FXI by proteolytic cleavage of the zymogen by FXIIa. Production of FXIa is tightly controlled and only occurs when coagulation is necessary for proper hemostasis. Therefore, by incorporation of the KLTRAET cleavage sequence, the XTEN domain is only be removed from FVIII concurrent with activation of the intrinsic coagulation pathway and when coagulation is required physiologically. This creates a situation where the CFXTEN fusion protein is processed in one additional manner during the activation of the intrinsic pathway.

[0670] C-Terminal XTEN Releasable by FIIa (Thrombin)

[0671] A CFXTEN fusion protein consisting of an XTEN protein fused to the C-terminus of FVIII is created with an XTEN release site cleavage sequence placed in between the FVIII and XTEN components, as depicted in FIG. 10. In this case, the release site contains an amino acid sequence that is recognized and cleaved by the FIIa protease (EC 3.4.21.5, Uniprot P00734). Specifically the sequence LTPRSLLV [Rawlings N. D., et al. (2008) Nucleic Acids Res., 36: D320], is cut after the arginine at position 4 in the sequence. Active FIIa is produced by cleavage of FII by FXa in the presence of phospholipids and calcium and is down stream from factor IX in the coagulation pathway. Once activated its natural role in coagulation is to cleave fibrinogin (FIG. 2), which then in turn, begins clot formation. FIIa activity is tightly controlled and only occurs when coagulation is necessary for proper hemostasis. Therefore, by incorporation of the LTPRSLLV sequence, the XTEN domain is only removed from FVIII concurrent with activation of either the extrinsic or intrinsic coagulation pathways, and when coagulation is required physiologically. This creates a situation where CFXTEN fusion is processed in one additional manner during the activation of coagulation.

[0672] C-Terminal XTEN Releasable by Elastase-2

[0673] A CFXTEN fusion protein consisting of an XTEN protein fused to the C-terminus of FVIII is created with an XTEN release site cleavage sequence placed in between the FVIII and XTEN components, as depicted in FIG. 10. Exemplary sequences are provided in Table 30. In this case, the release site contains an amino acid sequence that is recognized and cleaved by the elastase-2 protease (EC 3.4.21.37, Uniprot P08246). Specifically the sequence LGPVSGVP [Rawlings N. D., et al. (2008) Nucleic Acids Res., 36: D320], is cut after position 4 in the sequence. Elastase is constitutively expressed by neutrophils and is present at all times in the circulation. Its activity is tightly controlled by serpins and is therefore minimally active most of the time. Therefore as the long lived CFXTEN circulates, a fraction of it is cleaved, creating a pool of shorter-lived FVIII to be used in coagulation. In a desirable feature of the inventive composition, this creates a circulating pro-drug depot that constantly releases a prophylactic amount of FVIII.

[0674] C-Terminal XTEN Releasable by MMP-12

[0675] A CFXTEN fusion protein consisting of an XTEN protein fused to the C-terminus of FVIII is created with an XTEN release site cleavage sequence placed in between the FVIII and XTEN components, as depicted in FIG. 10. Exemplary sequences are provided in Table 30. In this case, the release site contains an amino acid sequence that is recognized and cleaved by the MMP-12 protease (EC 3.4.24.65, Uniprot P39900). Specifically the sequence GPAGLGGA [Rawlings N. D., et al. (2008) Nucleic Acids Res., 36: D320], is cut after position 4 of the sequence. MMP-12 is constitutively expressed in whole blood. Therefore as the long lived CFXTEN circulates, a fraction of it is cleaved, creating a pool of shorter-lived FVIII to be used in coagulation. In a desirable feature of the inventive composition, this creates a circulating pro-drug depot that constantly releases a prophylactic amount of FVIII.

[0676] C-Terminal XTEN Releasable by MMP-13

[0677] A CFXTEN fusion protein consisting of an XTEN protein fused to the C-terminus of FVIII is created with an XTEN release site cleavage sequence placed in between the FVIII and XTEN components, as depicted in FIG. 10. Exemplary sequences are provided in Table 30. In this case, the release site contains an amino acid sequence that is recognized and cleaved by the MMP-13 protease (EC 3.4.24.-, Uniprot P45452). Specifically the sequence GPAGLRGA [Rawlings N. D., et al. (2008) Nucleic Acids Res., 36: D320], is cut after position 4. MMP-13 is constitutively expressed in whole blood. Therefore as the long lived CFXTEN circulates, a fraction of it is cleaved, creating a pool of shorter-lived FVIII to be used in coagulation. In a desirable feature of the inventive composition, this creates a circulating pro-drug depot that constantly releases a prophylactic amount of FVIII.

[0678] C-Terminal XTEN Releasable by MMP-17

[0679] A CFXTEN fusion protein consisting of an XTEN protein fused to the C-terminus of FVIII is created with an XTEN release site cleavage sequence placed in between the FVIII and XTEN components, as depicted in FIG. 10. Exemplary sequences are provided in Table 30. In this case, the release site contains an amino acid sequence that is recognized and cleaved by the MMP-20 protease (EC.3.4.24.-, Uniprot Q9ULZ9). Specifically the sequence APLGLRLR [Rawlings N. D., et al. (2008) Nucleic Acids Res., 36: D320], is cut after position 4 in the sequence. MMP-17 is constitutively expressed in whole blood. Therefore as the long lived CFXTEN circulates, a fraction of it is cleaved, creating a pool of shorter-lived FVIII to be used in coagulation. In a desirable feature of the inventive composition, this creates a circulating pro-drug depot that constantly releases a prophylactic amount of FVIII.

[0680] C-Terminal XTEN Releasable by MMP-20

[0681] A CFXTEN fusion protein consisting of an XTEN protein fused to the C-terminus of FVIII is created with an XTEN release site cleavage sequence placed in between the FVIII and XTEN components, as depicted in FIG. 10. Exemplary sequences are provided in Table 30. In this case, the release site contains an amino acid sequence that is recognized and cleaved by the MMP-20 protease (EC.3.4.24.-, Uniprot 060882). Specifically the sequence PALPLVAQ [Rawlings N. D., et al. (2008) Nucleic Acids Res., 36: D320], is cut after position 4 (depicted by the arrow). MMP-20 is constitutively expressed in whole blood. Therefore as the long lived CFXTEN circulates, a fraction of it is cleaved, creating a pool of shorter-lived FVIII to be used in coagulation. In a desirable feature of the inventive composition, this creates a circulating pro-drug depot that constantly releases a prophylactic amount of FVIII.

[0682] Optimization of the Release Rate of XTEN

[0683] Variants of the foregoing Examples can be created in which the release rate of XTEN incorporated at the C-terminus, the N-terminus, or internal XTEN is altered. As the rate of XTEN release by an XTEN release protease is dependent on the sequence of the XTEN release site, by varying the amino acid sequence in the XTEN release site one can control the rate of XTEN release. The sequence specificity of many proteases is well known in the art, and is documented in several data bases. In this case, the amino acid specificity of proteases is mapped using combinatorial libraries of substrates [Harris, J. L., et al. (2000) Proc Natl Acad Sci USA, 97: 7754] or by following the cleavage of substrate mixtures as illustrated in [Schellenberger, V., et al. (1993) Biochemistry, 32: 4344]. An alternative is the identification of optimal protease cleavage sequences by phage display [Matthews, D., et al. (1993) Science, 260: 1113]. Constructs are made with variant sequences and assayed for XTEN release using standard assays for detection of the XTEN polypeptides.

### Example 26

### Human Clinical Trial Designs for Evaluating CFXTEN Comprising FVIII

[0684] Kogenate® FS is recombinant human coagulation factor VIII, intended for promoting hemostasis in hemophilia A subjects. Due to its short half-life, Kogenate is dosed intravenously every other day for prophylaxis and 8 to every 12 h in treatment of bleeds until hemostasis is achieved. It is believed that fusion of XTEN to FVIII improves the half-life of the protein, enabling a reduced dosing frequency using such CFXTEN-containing fusion protein compositions.

[0685] Clinical trials are designed such that the efficacy and advantages of CFXTEN, relative to Kogenate, can be verified in humans. For example, the CFXTEN is used in clinical trials for treatment of bleeding as performed for Kogenate. Such studies comprises three phases. First, a Phase I safety and pharmacokinetics study in adult patients is conducted to determine the maximum tolerated dose and pharmacokinetics and pharmacodynamics in humans (either normal subjects or patients with hemophilia), as well as to define potential toxicities and adverse events to be tracked in future studies. The Phase I studies are conducted in which single rising doses of CFXTEN compositions are administered by the route (e.g., subcutaneous, intramuscular, or intravenously) and biochemical, PK, and clinical parameters are measured at defined intervals. This permits the determination of the minimum effective dose and the maximum tolerated dose and establishes the threshold and maximum concentrations in dosage and circulating drug that constitute the therapeutic window for the respective components, as well as bioavailability when administered by the intramuscular or subcutaneous routes. From this information, the dose and dose schedule that permits less frequent administration of the CFXTEN compositions, yet retains the pharmacologic response, is obtained. Thereafter, clinical trials are conducted in patients with the disease, disorder or condition, verifying the effectiveness of the CFXTEN compositions under the dose conditions, which can be conducted in comparison to a positive control such as Kogenate to establish the enhanced properties of the CFXTEN compositions.

[0686] Clinical trials are conducted in patients suffering from any disease in which Kogenate may be expected to provide clinical benefit. For example, such indications include bleeding episodes in hemophilia A, patients with inhibitors to factor VIII, prevention of bleeding in surgical interventions or invasive procedures in hemophilia A patients with inhibitors to factor VIII, treatment of bleeding episodes in patients with congenital FVIII deficiency, and prevention of bleeding in surgical interventions or invasive procedures in patients with congenital FVIII deficiency. CFXTEN may also be indicated for use in additional patient populations. Parameters and clinical endpoints are measured as a function of the dosing of the fusion proteins compositions, yielding dose-ranging information on doses that is appropriate for a subsequent Phase III trial, in addition to collecting safety data related to adverse events. The PK parameters are correlated to the physiologic, clinical and safety parameter data to establish the therapeutic window and the therapeutic dose regimen for the CFXTEN composition, permitting the clinician to establish the appropriate dose ranges for the composition. Finally, a phase III efficacy study is conducted wherein patients is administered the CFXTEN composition at the dose regimen, and a positive control (such as a commercially-available Kogenate), or a placebo is administered using a dosing schedule deemed appropriate given the pharmacokinetic and pharmacodynamic properties of the respective compositions, with all agents administered for an appropriately extended period of time to achieve the study endpoints. Parameters that are monitored include aPTT assay, one- or two-stage clotting assays, control of bleeding episodes, or the occurrence of spontaneous bleeding episodes; parameters that are tracked relative to the placebo or positive control groups. Efficacy outcomes are determined using standard statistical methods. Toxicity and adverse event markers are also be followed in this study to verify that the compound is safe when used in the manner described.

### Example 27

### Analytical Size Exclusion Chromatography of XTEN Fusion Proteins with Diverse Payloads

[0687] Size exclusion chromatography analyses were performed on fusion proteins containing various therapeutic proteins and unstructured recombinant proteins of increasing length. An exemplary assay used a TSKGel-G4000 SWXL (7.8 mm×30 cm) column in which 40 mg of purified glucagon fusion protein at a concentration of 1 mg/ml was separated at a flow rate of 0.6 ml/min in 20 mM phosphate pH 6.8, 114 mM NaCl. Chromatogram profiles were monitored using OD214 nm and OD280 nm Column calibration for all assays were performed using a size exclusion calibration standard from BioRad; the markers include thyroglobulin (670 kDa), bovine gamma-globulin (158 kDa), chicken ovalbumin (44 kDa), equine myoglobuin (17 kDa) and vitamin B12 (1.35 kDa). Representative chromatographic profiles of Glucagon-Y288, Glucagon-Y144, Glucagon-Y72, Glucagon-Y36 are shown as an overlay in FIG. 19. The data show that the apparent molecular weight of each compound is proportional to the length of the attached XTEN sequence. However, the data also show that the apparent molecular weight of each construct is significantly larger than that expected for a globular protein (as shown by comparison to the standard proteins run in the same assay). Based on the SEC analyses for all constructs evaluated, including a CFXTEN composition, the apparent molecular weights, the apparent molecular weight factor (expressed as the ratio of apparent molecular weight to the calculated molecular weight) and the hydrodynamic radius (R_{H} in nm) are shown in Table 16. The results indicate that incorporation of different XTENs of 576 amino acids or greater confers an apparent molecular weight for the fusion protein of approximately 339 kDa to 760, and that XTEN of 864 amino acids or greater confers an apparent molecular weight greater than approximately 800 kDA. The results of proportional increases in apparent molecular weight to actual molecular weight were consistent for fusion proteins created with XTEN from several different motif families; i.e., AD, AE, AF, AG, and AM, with increases of at least four-fold and ratios as high as about 17-fold. Additionally, the incorporation of XTEN fusion partners with 576 amino acids or more into fusion proteins with the various payloads (and 288 residues in the case of glucagon fused to Y288) resulted with a hydrodynamic radius of 7 nm or greater, well beyond the glomerular pore size of approximately 3-5 nm Accordingly, it is expected that fusion proteins comprising growth and XTEN have reduced renal clearance, contributing to increased terminal half-life and improving the therapeutic or biologic effect relative to a corresponding un-fused biologic payload protein.

TABLE 16
SEC analysis of various polypeptides

| | | | | | Apparent | |
|---|---|---|---|---|---|---|
| Con- | XTEN or | Thera- | Actual | Apparent | Molecular | |
| struct | fusion | peutic | MW | MW | Weight | R_{H} |
| Name | partner | Protein | (kDa) | (kDa) | Factor | (nm) |
| AC14 | Y288 | Glucagon | 28.7 | 370 | 12.9 | 7.0 |
| AC28 | Y144 | Glucagon | 16.1 | 117 | 7.3 | 5.0 |
| AC34 | Y72 | Glucagon | 9.9 | 58.6 | 5.9 | 3.8 |
| AC33 | Y36 | Glucagon | 6.8 | 29.4 | 4.3 | 2.6 |
| AC89 | AF120 | Glucagon | 14.1 | 76.4 | 5.4 | 4.3 |
| AC88 | AF108 | Glucagon | 13.1 | 61.2 | 4.7 | 3.9 |
| AC73 | AF144 | Glucagon | 16.3 | 95.2 | 5.8 | 4.7 |
| AC53 | AG576 | GFP | 74.9 | 339 | 4.5 | 7.0 |
| AC39 | AD576 | GFP | 76.4 | 546 | 7.1 | 7.7 |
| AC41 | AE576 | GFP | 80.4 | 760 | 9.5 | 8.3 |
| AC52 | AF576 | GFP | 78.3 | 526 | 6.7 | 7.6 |
| AC398 | AE288 | FVII | 76.3 | 650 | 8.5 | 8.2 |
| AC404 | AE864 | FVII | 129 | 1900 | 14.7 | 10.1 |
| AC85 | AE864 | Exendin-4 | 83.6 | 938 | 11.2 | 8.9 |
| AC114 | AM875 | Exendin-4 | 82.4 | 1344 | 16.3 | 9.4 |
| AC143 | AM875 | CF | 100.6 | 846 | 8.4 | 8.7 |
| AC227 | AM875 | IL-1ra | 95.4 | 1103 | 11.6 | 9.2 |
| AC228 | AM1318 | IL-1ra | 134.8 | 2286 | 17.0 | 10.5 |

### Example 28

### Pharmacokinetics of Extended Polypeptides Fused to GFP in Cynomolgus Monkeys

[0688] The pharmacokinetics of GFP-L288, GFP-L576, GFP-XTEN_AF576, GFP-XTEN_Y576 and XTEN_AD836-GFP were tested in cynomolgus monkeys to determine the effect of composition and length of the unstructured polypeptides on PK parameters. Blood samples were analyzed at various times after injection and the concentration of GFP in plasma was measured by ELISA using a polyclonal antibody against GFP for capture and a biotinylated preparation of the same polyclonal antibody for detection. Results are summarized in FIG. 17. They show a surprising increase of half-life with increasing length of the XTEN sequence. For example, a half-life of 10 h was determined for GFP-XTEN_L288 (with 288 amino acid residues in the XTEN). Doubling the length of the unstructured polypeptide fusion partner to 576 amino acids increased the half-life to 20-22 h for multiple fusion protein constructs; i.e., GFP-XTEN_L576, GFP-XTEN_AF576, GFP-XTEN_Y576. A further increase of the unstructured polypeptide fusion partner length to 836 residues resulted in a half-life of 72-75 h for XTEN_AD836-GFP. Thus, increasing the polymer length by 288 residues from 288 to 576 residues increased in vivo half-life by about 10 h. However, increasing the polypeptide length by 260 residues from 576 residues to 836 residues increased half-life by more than 50 h. These results show that there is a surprising threshold of unstructured polypeptide length that results in a greater than proportional gain in in vivo half-life. Thus, fusion proteins comprising extended, unstructured polypeptides are expected to have the property of enhanced pharmacokinetics compared to polypeptides of shorter lengths.

### Example 29

### Serum Stability of XTEN

[0689] A fusion protein containing XTEN_AE864 fused to the N-terminus of GFP was incubated in monkey plasma and rat kidney lysate for up to 7 days at 37° C. Samples were withdrawn at time 0, Day 1 and Day 7 and analyzed by SDS PAGE followed by detection using Western analysis and detection with antibodies against GFP as shown in FIG. 18. The sequence of XTEN_AE864 showed negligible signs of degradation over 7 days in plasma. However, XTEN_AE864 was rapidly degraded in rat kidney lysate over 3 days. The in vivo stability of the fusion protein was tested in plasma samples wherein the GFP_AE864 was immunoprecipitated and analyzed by SDS PAGE as described above. Samples that were withdrawn up to 7 days after injection showed very few signs of degradation. The results demonstrate the resistance of CFXTEN to degradation due to serum proteases; a factor in the enhancement of pharmacokinetic properties of the CFXTEN fusion proteins.

### Example 30

### Increasing Solubility and Stability of a Peptide Payload by Linking to XTEN

[0690] In order to evaluate the ability of XTEN to enhance the physicochemical properties of solubility and stability, fusion proteins of glucagon plus shorter-length XTEN were prepared and evaluated. The test articles were prepared in Tris-buffered saline at neutral pH and characterization of the Gcg-XTEN solution was by reverse-phase HPLC and size exclusion chromatography to affirm that the protein was homogeneous and non-aggregated in solution. The data are presented in Table 17. For comparative purposes, the solubility limit of unmodified glucagon in the same buffer was measured at 60 μM (0.2 mg/mL), and the result demonstrate that for all lengths of XTEN added, a substantial increase in solubility was attained. Importantly, in most cases the glucagon-XTEN fusion proteins were prepared to achieve target concentrations and were not evaluated to determine the maximum solubility limits for the given construct. However, in the case of glucagon linked to the AF-144×TEN, the limit of solubility was determined, with the result that a 60-fold increase in solubility was achieved, compared to glucagon not linked to XTEN. In addition, the glucagon-AF144 CFXTEN was evaluated for stability, and was found to be stable in liquid formulation for at least 6 months under refrigerated conditions and for approximately one month at 37° C. (data not shown).

[0691] The data support the conclusion that the linking of short-length XTEN polypeptides to a biologically active protein such as glucagon can markedly enhance the solubility properties of the protein by the resulting fusion protein, as well as confer stability at the higher protein concentrations.

TABLE 17
Solubility of Glucagon-XTEN constructs

| Test Article | Solubility | |
|---|---|---|
| Glucagon | 60 | μM |
| Glucagon-Y36 | >370 | μM |
| Glucagon-Y72 | >293 | μM |
| Glucagon-AF108 | >145 | μM |
| Glucagon-AF120 | >160 | μM |
| Glucagon-Y144 | >497 | μM |
| Glucagon-AE144 | >467 | μM |
| Glucagon-AF144 | >3600 | μM |
| Glucagon-Y288 | >163 | μM |

### Example 31

### Analysis of Sequences for Secondary Structure by Prediction Algorithms

[0692] Amino acid sequences can be assessed for secondary structure via certain computer programs or algorithms, such as the well-known Chou-Fasman algorithm (Chou, P. Y., et al. (1974) Biochemistry, 13: 222-45) and the Garnier-Osguthorpe-Robson, or “GOR” method (Garnier J, Gibrat J F, Robson B. (1996). GOR method for predicting protein secondary structure from amino acid sequence. Methods Enzymol 266:540-553). For a given sequence, the algorithms can predict whether there exists some or no secondary structure at all, expressed as total and/or percentage of residues of the sequence that form, for example, alpha-helices or beta-sheets or the percentage of residues of the sequence predicted to result in random coil formation.

[0693] Several representative sequences from XTEN “families” have been assessed using two algorithm tools for the Chou-Fasman and GOR methods to assess the degree of secondary structure in these sequences. The Chou-Fasman tool was provided by William R. Pearson and the University of Virginia, at the “Biosupport” internet site, URL located on the World Wide Web at .fasta.bioch.virginia.edu/fasta_www2/fasta_www.cgi?rm=misc1 as it existed on Jun. 19, 2009. The GOR tool was provided by Pole Informatique Lyonnais at the Network Protein Sequence Analysis internet site, URL located on the World Wide Web at .npsa-pbil.ibcp.fr/cgi-bin/secpred_gor4.pl as it existed on Jun. 19, 2008.

[0694] As a first step in the analyses, a single XTEN sequence was analyzed by the two algorithms. The AE864 composition is an XTEN with 864 amino acid residues created from multiple copies of four 12 amino acid sequence motifs consisting of the amino acids G, S, T, E, P, and A. The sequence motifs are characterized by the fact that there is limited repetitiveness within the motifs and within the overall sequence in that the sequence of any two consecutive amino acids is not repeated more than twice in any one 12 amino acid motif, and that no three contiguous amino acids of full-length the XTEN are identical. Successively longer portions of the AF 864 sequence from the N-terminus were analyzed by the Chou-Fasman and GOR algorithms (the latter requires a minimum length of 17 amino acids). The sequences were analyzed by entering the FASTA format sequences into the prediction tools and running the analysis. The results from the analyses are presented in Table 18.

[0695] The results indicate that, by the Chou-Fasman calculations, short XTEN of the AE and AG families, up to at least 288 amino acid residues, have no alpha-helices or beta-sheets, but amounts of predicted percentage of random coil by the GOR algorithm vary from 78-99%. With increasing XTEN lengths of 504 residues to greater than 1300, the XTEN analyzed by the Chou-Fasman algorithm had predicted percentages of alpha-helices or beta-sheets of 0 to about 2%, while the calculated percentages of random coil increased to from 94-99%. Those XTEN with alpha-helices or beta-sheets were those sequences with one or more instances of three contiguous serine residues, which resulted in predicted beta-sheet formation. However, even these sequences still had approximately 99% random coil formation.

[0696] The data provided herein suggests that 1) XTEN created from multiple sequence motifs of G, S, T, E, P, and A that have limited repetitiveness as to contiguous amino acids are predicted to have very low amounts of alpha-helices and beta-sheets; 2) that increasing the length of the XTEN does not appreciably increase the probability of alpha-helix or beta-sheet formation; and 3) that progressively increasing the length of the XTEN sequence by addition of non-repetitive 12-mers consisting of the amino acids G, S, T, E, P, and A results in increased percentage of random coil formation. Results further indicate that XTEN sequences defined herein (including e.g., XTEN created from sequence motifs of G, S, T, E, P, and A) have limited repetitiveness (including those with no more than two identical contiguous amino acids in any one motif) are expected to have very limited secondary structure. Any order or combination of sequence motifs from Table 3 can be used to create an XTEN polypeptide that will result in an XTEN sequence that is substantially devoid of secondary structure, though three contiguous serines are not preferred. The unfavorable property of three contiguous series however, can be ameliorated by increasing the length of the XTEN. Such sequences are expected to have the characteristics described in the CFXTEN embodiments of the invention disclosed herein.

TABLE 18
CHOU-FASMAN and GOR prediction calculations of polypeptide sequences

| | | | | |
|---|---|---|---|---|
| SEQ | | No. | Chou-Fasman | GOR |
| NAME | Sequence | Residues | Calculation | Calculation |

| | | | | |
|---|---|---|---|---|
| AE36: | GSPAGSPTSTEEGTSESATPESGPGT | 36 | Residue totals: H: 0 E: 0 | 94.44% |
| LCW0402_002 | STEPSEGSAP | | percent: H: 0.0 E: 0.0 | |
| AE36: | GTSTEPSEGSAPGTSTEPSEGSAPGT | 36 | Residue totals: H: 0 E: 0 | 94.44% |
| LCW0402_003 | STEPSEGSAP | | percent: H: 0.0 E: 0.0 | |
| AG36: | GASPGTSSTGSPGTPGSGTASSSPGS | 36 | Residue totals: H: 0 E: 0 | 77.78% |
| LCW0404_001 | STPSGATGSP | | percent: H: 0.0 E: 0.0 | |
| AG36: | GSSTPSGATGSPGSSPSASTGTGPGS | 36 | Residue totals: H: 0 E: 0 | 83.33% |
| LCW0404_003 | STPSGATGSP | | percent: H: 0.0 E: 0.0 | |
| AE42_1 | TEPSEGSAPGSPAGSPTSTEEGTSES | 42 | Residue totals: H: 0 E: 0 | 90.48% |
| | ATPESGPGSEPATSGS | | percent: H: 0.0 E: 0.0 | |
| AE42_1 | TEPSEGSAPGSPAGSPTSTEEGTSES | 42 | Residue totals: H: 0 E: 0 | 90.48% |
| | ATPESGPGSEPATSGS | | percent: H: 0.0 E: 0.0 | |
| AG42_1 | GAPSPSASTGTGPGTPGSGTASSSPG | 42 | Residue totals: H: 0 E: 0 | 88.10% |
| | SSTPSGATGSPGPSGP | | percent: H: 0.0 E: 0.0 | |
| AG42_2 | GPGTPGSGTASSSPGSSTPSGATGSP | 42 | Residue totals: H: 0 E: 0 | 88.10% |
| | GSSPSASTGTGPGASP | | percent: H: 0.0 E: 0.0 | |
| AE144 | GSEPATSGSETPGTSESATPESGPGS | 144 | Residue totals: H: 0 E: 0 | 98.61% |
| | EPATSGSETPGSPAGSPTSTEEGTST | | percent: H: 0.0 E: 0.0 | |
| | EPSEGSAPGSEPATSGSETPGSEPAT | | | |
| | SGSETPGSEPATSGSETPGTSTEPSE | | | |
| | GSAPGTSESATPESGPGSEPATSGSE | | | |
| | TPGTSTEPSEGSAP | | | |
| AG144_1 | PGSSPSASTGTGPGSSPSASTGTGPG | 144 | Residue totals: H: 0 E: 0 | 91.67% |
| | TPGSGTASSSPGSSTPSGATGSPGSS | | percent: H: 0.0 E: 0.0 | |
| | PSASTGTGPGASPGTSSTGSPGTPGS | | | |
| | GTASSSPGSSTPSGATGSPGTPGSGT | | | |
| | ASSSPGASPGTSSTGSPGASPGTSST | | | |
| | GSPGTPGSGTASSS | | | |
| AE288 | GTSESATPESGPGSEPATSGSETPGT | 288 | Residue totals: H: 0 E: 0 | 99.31% |
| | SESATPESGPGSEPATSGSETPGTSE | | percent: H: 0.0 E: 0.0 | |
| | SATPESGPGTSTEPSEGSAPGSPAGS | | | |
| | PTSTEEGTSESATPESGPGSEPATSG | | | |
| | SETPGTSESATPESGPGSPAGSPTST | | | |
| | EEGSPAGSPTSTEEGTSTEPSEGSAP | | | |
| | GTSESATPESGPGTSESATPESGPGT | | | |
| | SESATPESGPGSEPATSGSETPGSEP | | | |
| | ATSGSETPGSPAGSPTSTEEGTSTEP | | | |
| | SEGSAPGTSTEPSEGSAPGSEPATSG | | | |
| | SETPGTSESATPESGPGTSTEPSEGS | | | |
| | AP | | | |
| AG288_2 | GSSPSASTGTGPGSSPSASTGTGPGT | 288 | Residue totals: H: 0 E: 0 | 92.71 |
| | PGSGTASSSPGSSTPSGATGSPGSSP | | percent: H: 0.0 E: 0.0 | |
| | SASTGTGPGASPGTSSTGSPGTPGSG | | | |
| | TASSSPGSSTPSGATGSPGTPGSGTA | | | |
| | SSSPGASPGTSSTGSPGASPGTSSTG | | | |
| | SPGTPGSGTASSSPGSSTPSGATGSP | | | |
| | GASPGTSSTGSPGTPGSGTASSSPGS | | | |
| | STPSGATGSPGSSPSASTGTGPGSSP | | | |
| | SASTGTGPGSSTPSGATGSPGSSTPS | | | |
| | GATGSPGASPGTSSTGSPGASPGTSS | | | |
| | TGSPGASPGTSSTGSPGTPGSGTASS | | | |
| | SP | | | |
| AF504 | GASPGTSSTGSPGSSPSASTGTGPGS | 504 | Residue totals: H: 0 E: 0 | 94.44% |
| | SPSASTGTGPGTPGSGTASSSPGSST | | percent: H: 0.0 E: 0.0 | |
| | PSGATGSPGSNPSASTGTGPGASPG | | | |
| | TSSTGSPGTPGSGTASSSPGSSTPSG | | | |
| | ATGSPGTPGSGTASSSPGASPGTSST | | | |
| | GSPGASPGTSSTGSPGTPGSGTASSS | | | |
| | PGSSTPSGATGSPGASPGTSSTGSPG | | | |
| | TPGSGTASSSPGSSTPSGATGSPGSN | | | |
| | PSASTGTGPGSSPSASTGTGPGSSTP | | | |
| | SGATGSPGSSTPSGATGSPGASPGTS | | | |
| | STGSPGASPGTSSTGSPGASPGTSST | | | |
| | GSPGTPGSGTASSSPGASPGTSSTGS | | | |
| | PGASPGTSSTGSPGASPGTSSTGSPG | | | |
| | SSPSASTGTGPGTPGSGTASSSPGAS | | | |
| | PGTSSTGSPGASPGTSSTGSPGASPG | | | |
| | TSSTGSPGSSTPSGATGSPGSSTPSG | | | |
| | ATGSPGASPGTSSTGSPGTPGSGTAS | | | |
| | SSPGSSTPSGATGSPGSSTPSGATGS | | | |
| | PGSSTPSGATGSPGSSPSASTGTGPG | | | |
| | ASPGTSSTGSP | | | |
| AD 576 | GSSESGSSEGGPGSGGEPSESGSSGS | 576 | Residue totals: H: 7 E: 0 | 99.65% |
| | SESGSSEGGPGSSESGSSEGGPGSSE | | percent: H: 1.2 E: 0.0 | |
| | SGSSEGGPGSSESGSSEGGPGSSESG | | | |
| | SSEGGPGESPGGSSGSESGSEGSSGP | | | |
| | GESSGSSESGSSEGGPGSSESGSSEG | | | |
| | GPGSSESGSSEGGPGSGGEPSESGSS | | | |
| | GESPGGSSGSESGESPGGSSGSESGS | | | |
| | GGEPSESGSSGSSESGSSEGGPGSGG | | | |
| | EPSESGSSGSGGEPSESGSSGSEGSS | | | |
| | GPGESSGESPGGSSGSESGSGGEPSE | | | |
| | SGSSGSGGEPSESGSSGSGGEPSESG | | | |
| | SSGSSESGSSEGGPGESPGGSSGSES | | | |
| | GESPGGSSGSESGESPGGSSGSESGE | | | |
| | SPGGSSGSESGESPGGSSGSESGSSE | | | |
| | SGSSEGGPGSGGEPSESGSSGSEGSS | | | |
| | GPGESSGSSESGSSEGGPGSGGEPSE | | | |
| | SGSSGSSESGSSEGGPGSGGEPSESG | | | |
| | SSGESPGGSSGSESGESPGGSSGSES | | | |
| | GSSESGSSEGGPGSGGEPSESGSSGS | | | |
| | SESGSSEGGPGSGGEPSESGSSGSGG | | | |
| | EPSESGSSGESPGGSSGSESGSEGSS | | | |
| | GPGESSGSSESGSSEGGPGSEGSSGP | | | |
| | GESS | | | |
| AE576 | GSPAGSPTSTEEGTSESATPESGPGT | 576 | Residue totals: H: 2 E: 0 | 99.65% |
| | STEPSEGSAPGSPAGSPTSTEEGTST | | percent: H: 0.4 E: 0.0 | |
| | EPSEGSAPGTSTEPSEGSAPGTSESA | | | |
| | TPESGPGSEPATSGSETPGSEPATSG | | | |
| | SETPGSPAGSPTSTEEGTSESATPES | | | |
| | GPGTSTEPSEGSAPGTSTEPSEGSAP | | | |
| | GSPAGSPTSTEEGTSTEPSEGSAPGT | | | |
| | STEPSEGSAPGTSESATPESGPGTST | | | |
| | EPSEGSAPGTSESATPESGPGSEPAT | | | |
| | SGSETPGTSTEPSEGSAPGTSTEPSE | | | |
| | GSAPGTSESATPESGPGTSESATPES | | | |
| | GPGSPAGSPTSTEEGTSESATPESGP | | | |
| | GSEPATSGSETPGTSESATPESGPGT | | | |
| | STEPSEGSAPGTSTEPSEGSAPGTST | | | |
| | EPSEGSAPGTSTEPSEGSAPGTSTEP | | | |
| | SEGSAPGTSTEPSEGSAPGSPAGSPT | | | |
| | STEEGTSTEPSEGSAPGTSESATPES | | | |
| | GPGSEPATSGSETPGTSESATPESGP | | | |
| | GSEPATSGSETPGTSESATPESGPGT | | | |
| | STEPSEGSAPGTSESATPESGPGSPA | | | |
| | GSPTSTEEGSPAGSPTSTEEGSPAGS | | | |
| | PTSTEEGTSESATPESGPGTSTEPSE | | | |
| | GSAP | | | |
| AG576 | PGTPGSGTASSSPGSSTPSGATGSPG | 576 | Residue totals: H: 0 E: 3 | 99.31% |
| | SSPSASTGTGPGSSPSASTGTGPGSS | | percent: H: 0.4 E: 0.5 | |
| | TPSGATGSPGSSTPSGATGSPGASPG | | | |
| | TSSTGSPGASPGTSSTGSPGASPGTS | | | |
| | STGSPGTPGSGTASSSPGASPGTSST | | | |
| | GSPGASPGTSSTGSPGASPGTSSTGS | | | |
| | PGSSPSASTGTGPGTPGSGTASSSPG | | | |
| | ASPGTSSTGSPGASPGTSSTGSPGAS | | | |
| | PGTSSTGSPGSSTPSGATGSPGSSTPS | | | |
| | GATGSPGASPGTSSTGSPGTPGSGT | | | |
| | ASSSPGSSTPSGATGSPGSSTPSGAT | | | |
| | GSPGSSTPSGATGSPGSSPSASTGTG | | | |
| | PGASPGTSSTGSPGASPGTSSTGSPG | | | |
| | TPGSGTASSSPGASPGTSSTGSPGAS | | | |
| | PGTSSTGSPGASPGTSSTGSPGASPG | | | |
| | TSSTGSPGTPGSGTASSSPGSSTPSG | | | |
| | ATGSPGTPGSGTASSSPGSSTPSGAT | | | |
| | GSPGTPGSGTASSSPGSSTPSGATGS | | | |
| | PGSSTPSGATGSPGSSPSASTGTGPG | | | |
| | SSPSASTGTGPGASPGTSSTGSPGTP | | | |
| | GSGTASSSPGSSTPSGATGSPGSSPS | | | |
| | ASTGTGPGSSPSASTGTGPGASPGTS | | | |
| | STGS | | | |
| AF540 | GSTSSTAESPGPGSTSSTAESPGPGS | 540 | Residue totals: H: 2 E: 0 | 99.65 |
| | TSESPSGTAPGSTSSTAESPGPGSTSS | | percent: H: 0.4 E: 0.0 | |
| | TAESPGPGTSTPESGSASPGSTSESPS | | | |
| | GTAPGTSPSGESSTAPGSTSESPSGT | | | |
| | APGSTSESPSGTAPGTSPSGESSTAP | | | |
| | GSTSESPSGTAPGSTSESPSGTAPGT | | | |
| | SPSGESSTAPGSTSESPSGTAPGSTSE | | | |
| | SPSGTAPGSTSESPSGTAPGTSTPES | | | |
| | GSASPGSTSESPSGTAPGTSTPESGS | | | |
| | ASPGSTSSTAESPGPGSTSSTAESPG | | | |
| | PGTSTPESGSASPGTSTPESGSASPG | | | |
| | STSESPSGTAPGTSTPESGSASPGTST | | | |
| | PESGSASPGSTSESPSGTAPGSTSESP | | | |
| | SGTAPGSTSESPSGTAPGSTSSTAES | | | |
| | PGPGTSTPESGSASPGTSTPESGSAS | | | |
| | PGSTSESPSGTAPGSTSESPSGTAPG | | | |
| | TSTPESGSASPGSTSESPSGTAPGSTS | | | |
| | ESPSGTAPGTSTPESGSASPGTSPSG | | | |
| | ESSTAPGSTSSTAESPGPGTSPSGESS | | | |
| | TAPGSTSSTAESPGPGTSTPESGSAS | | | |
| | PGSTSESPSGTAP | | | |
| AD836 | GSSESGSSEGGPGSSESGSSEGGPGE | 836 | Residue totals: H: 0 E: 0 | 98.44% |
| | SPGGSSGSESGSGGEPSESGSSGESP | | percent: H: 0.0 E: 0.0 | |
| | GGSSGSESGESPGGSSGSESGSSESG | | | |
| | SSEGGPGSSESGSSEGGPGSSESGSS | | | |
| | EGGPGESPGGSSGSESGESPGGSSGS | | | |
| | ESGESPGGSSGSESGSSESGSSEGGP | | | |
| | GSSESGSSEGGPGSSESGSSEGGPGS | | | |
| | SESGSSEGGPGSSESGSSEGGPGSSE | | | |
| | SGSSEGGPGSGGEPSESGSSGESPGG | | | |
| | SSGSESGESPGGSSGSESGSGGEPSE | | | |
| | SGSSGSEGSSGPGESSGSSESGSSEG | | | |
| | GPGSGGEPSESGSSGSEGSSGPGESS | | | |
| | GSSESGSSEGGPGSGGEPSESGSSGE | | | |
| | SPGGSSGSESGSGGEPSESGSSGSGG | | | |
| | EPSESGSSGSSESGSSEGGPGSGGEP | | | |
| | SESGSSGSGGEPSESGSSGSEGSSGP | | | |
| | GESSGESPGGSSGSESGSEGSSGPGE | | | |
| | SSGSEGSSGPGESSGSGGEPSESGSS | | | |
| | GSSESGSSEGGPGSSESGSSEGGPGE | | | |
| | SPGGSSGSESGSGGEPSESGSSGSEG | | | |
| | SSGPGESSGESPGGSSGSESGSEGSS | | | |
| | GPGSSESGSSEGGPGSGGEPSESGSS | | | |
| | GSEGSSGPGESSGSEGSSGPGESSGS | | | |
| | EGSSGPGESSGSGGEPSESGSSGSGG | | | |
| | EPSESGSSGESPGGSSGSESGESPGG | | | |
| | SSGSESGSGGEPSESGSSGSEGSSGP | | | |
| | GESSGESPGGSSGSESGSSESGSSEG | | | |
| | GPGSSESGSSEGGPGSSESGSSEGGP | | | |
| | GSGGEPSESGSSGSSESGSSEGGPGE | | | |
| | SPGGSSGSESGSGGEPSESGSSGSSE | | | |
| | SGSSEGGPGESPGGSSGSESGSGGEP | | | |
| | SESGSSGESPGGSSGSESGSGGEPSE | | | |
| | SGSS | | | |
| AE864 | GSPAGSPTSTEEGTSESATPESGPGT | 864 | Residue totals: H: 2 E: 3 | 99.77% |
| | STEPSEGSAPGSPAGSPTSTEEGTST | | percent: H: 0.2 E: 0.4 | |
| | EPSEGSAPGTSTEPSEGSAPGTSESA | | | |
| | TPESGPGSEPATSGSETPGSEPATSG | | | |
| | SETPGSPAGSPTSTEEGTSESATPES | | | |
| | GPGTSTEPSEGSAPGTSTEPSEGSAP | | | |
| | GSPAGSPTSTEEGTSTEPSEGSAPGT | | | |
| | STEPSEGSAPGTSESATPESGPGTST | | | |
| | EPSEGSAPGTSESATPESGPGSEPAT | | | |
| | SGSETPGTSTEPSEGSAPGTSTEPSE | | | |
| | GSAPGTSESATPESGPGTSESATPES | | | |
| | GPGSPAGSPTSTEEGTSESATPESGP | | | |
| | GSEPATSGSETPGTSESATPESGPGT | | | |
| | STEPSEGSAPGTSTEPSEGSAPGTST | | | |
| | EPSEGSAPGTSTEPSEGSAPGTSTEP | | | |
| | SEGSAPGTSTEPSEGSAPGSPAGSPT | | | |
| | STEEGTSTEPSEGSAPGTSESATPES | | | |
| | GPGSEPATSGSETPGTSESATPESGP | | | |
| | GSEPATSGSETPGTSESATPESGPGT | | | |
| | STEPSEGSAPGTSESATPESGPGSPA | | | |
| | GSPTSTEEGSPAGSPTSTEEGSPAGS | | | |
| | PTSTEEGTSESATPESGPGTSTEPSE | | | |
| | GSAPGTSESATPESGPGSEPATSGSE | | | |
| | TPGTSESATPESGPGSEPATSGSETP | | | |
| | GTSESATPESGPGTSTEPSEGSAPGS | | | |
| | PAGSPTSTEEGTSESATPESGPGSEP | | | |
| | ATSGSETPGTSESATPESGPGSPAGS | | | |
| | PTSTEEGSPAGSPTSTEEGTSTEPSE | | | |
| | GSAPGTSESATPESGPGTSESATPES | | | |
| | GPGTSESATPESGPGSEPATSGSETP | | | |
| | GSEPATSGSETPGSPAGSPTSTEEGT | | | |
| | STEPSEGSAPGTSTEPSEGSAPGSEP | | | |
| | ATSGSETPGTSESATPESGPGTSTEP | | | |
| | SEGSAP | | | |
| AF864 | GSTSESPSGTAPGTSPSGESSTAPGS | 875 | Residue totals: H: 2 E: 0 | 95.20% |
| | TSESPSGTAPGSTSESPSGTAPGTSTP | | percent: H: 0.2 E: 0.0 | |
| | ESGSASPGTSTPESGSASPGSTSESPS | | | |
| | GTAPGSTSESPSGTAPGTSPSGESST | | | |
| | APGSTSESPSGTAPGTSPSGESSTAP | | | |
| | GTSPSGESSTAPGSTSSTAESPGPGT | | | |
| | SPSGESSTAPGTSPSGESSTAPGSTSS | | | |
| | TAESPGPGTSTPESGSASPGTSTPES | | | |
| | GSASPGSTSESPSGTAPGSTSESPSG | | | |
| | TAPGTSTPESGSASPGSTSSTAESPG | | | |
| | PGTSTPESGSASPGSTSESPSGTAPG | | | |
| | TSPSGESSTAPGSTSSTAESPGPGTSP | | | |
| | SGESSTAPGTSTPESGSASPGSTSST | | | |
| | AESPGPGSTSSTAESPGPGSTSSTAE | | | |
| | SPGPGSTSSTAESPGPGTSPSGESST | | | |
| | APGSTSESPSGTAPGSTSESPSGTAP | | | |
| | GTSTPESGPXXXGASASGAPSTXXX | | | |
| | XSESPSGTAPGSTSESPSGTAPGSTS | | | |
| | ESPSGTAPGSTSESPSGTAPGSTSESP | | | |
| | SGTAPGSTSESPSGTAPGTSTPESGS | | | |
| | ASPGTSPSGESSTAPGTSPSGESSTA | | | |
| | PGSTSSTAESPGPGTSPSGESSTAPG | | | |
| | TSTPESGSASPGSTSESPSGTAPGSTS | | | |
| | ESPSGTAPGTSPSGESSTAPGSTSESP | | | |
| | SGTAPGTSTPESGSASPGTSTPESGS | | | |
| | ASPGSTSESPSGTAPGTSTPESGSAS | | | |
| | PGSTSSTAESPGPGSTSESPSGTAPG | | | |
| | STSESPSGTAPGTSPSGESSTAPGSTS | | | |
| | STAESPGPGTSPSGESSTAPGTSTPES | | | |
| | GSASPGTSPSGESSTAPGTSPSGESS | | | |
| | TAPGTSPSGESSTAPGSTSSTAESPG | | | |
| | PGSTSSTAESPGPGTSPSGESSTAPG | | | |
| | SSPSASTGTGPGSSTPSGATGSPGSS | | | |
| | TPSGATGSP | | | |
| AG864 | GASPGTSSTGSPGSSPSASTGTGPGS | 864 | Residue totals: H: 0 E: 0 | 94.91% |
| | SPSASTGTGPGTPGSGTASSSPGSST | | percent: H: 0.0 E: 0.0 | |
| | PSGATGSPGSSPSASTGTGPGASPGT | | | |
| | SSTGSPGTPGSGTASSSPGSSTPSGA | | | |
| | TGSPGTPGSGTASSSPGASPGTSSTG | | | |
| | SPGASPGTSSTGSPGTPGSGTASSSP | | | |
| | GSSTPSGATGSPGASPGTSSTGSPGT | | | |
| | PGSGTASSSPGSSTPSGATGSPGSSP | | | |
| | SASTGTGPGSSPSASTGTGPGSSTPS | | | |
| | GATGSPGSSTPSGATGSPGASPGTSS | | | |
| | TGSPGASPGTSSTGSPGASPGTSSTG | | | |
| | SPGTPGSGTASSSPGASPGTSSTGSP | | | |
| | GASPGTSSTGSPGASPGTSSTGSPGS | | | |
| | SPSASTGTGPGTPGSGTASSSPGASP | | | |
| | GTSSTGSPGASPGTSSTGSPGASPGT | | | |
| | SSTGSPGSSTPSGATGSPGSSTPSGA | | | |
| | TGSPGASPGTSSTGSPGTPGSGTASS | | | |
| | SPGSSTPSGATGSPGSSTPSGATGSP | | | |
| | GSSTPSGATGSPGSSPSASTGTGPGA | | | |
| | SPGTSSTGSPGASPGTSSTGSPGTPG | | | |
| | SGTASSSPGASPGTSSTGSPGASPGT | | | |
| | SSTGSPGASPGTSSTGSPGASPGTSS | | | |
| | TGSPGTPGSGTASSSPGSSTPSGATG | | | |
| | SPGTPGSGTASSSPGSSTPSGATGSP | | | |
| | GTPGSGTASSSPGSSTPSGATGSPGS | | | |
| | STPSGATGSPGSSPSASTGTGPGSSP | | | |
| | SASTGTGPGASPGTSSTGSPGTPGSG | | | |
| | TASSSPGSSTPSGATGSPGSSPSAST | | | |
| | GTGPGSSPSASTGTGPGASPGTSSTG | | | |
| | SPGASPGTSSTGSPGSSTPSGATGSP | | | |
| | GSSPSASTGTGPGASPGTSSTGSPGS | | | |
| | SPSASTGTGPGTPGSGTASSSPGSST | | | |
| | PSGATGSPGSSTPSGATGSPGASPGT | | | |
| | SSTGSP | | | |
| AM875 | GTSTEPSEGSAPGSEPATSGSETPGS | 875 | Residue totals: H: 7 E: 3 | 98.63% |
| | PAGSPTSTEEGSTSSTAESPGPGTST | | percent: H: 0.8 E: 0.3 | |
| | PESGSASPGSTSESPSGTAPGSTSESP | | | |
| | SGTAPGTSTPESGSASPGTSTPESGS | | | |
| | ASPGSEPATSGSETPGTSESATPESG | | | |
| | PGSPAGSPTSTEEGTSTEPSEGSAPG | | | |
| | TSESATPESGPGTSTEPSEGSAPGTS | | | |
| | TEPSEGSAPGSPAGSPTSTEEGTSTE | | | |
| | PSEGSAPGTSTEPSEGSAPGTSESAT | | | |
| | PESGPGTSESATPESGPGTSTEPSEG | | | |
| | SAPGTSTEPSEGSAPGTSESATPESG | | | |
| | PGTSTEPSEGSAPGSEPATSGSETPG | | | |
| | SPAGSPTSTEEGSSTPSGATGSPGTP | | | |
| | GSGTASSSPGSSTPSGATGSPGTSTE | | | |
| | PSEGSAPGTSTEPSEGSAPGSEPATS | | | |
| | GSETPGSPAGSPTSTEEGSPAGSPTS | | | |
| | TEEGTSTEPSEGSAPGASASGAPSTG | | | |
| | GTSESATPESGPGSPAGSPTSTEEGS | | | |
| | PAGSPTSTEEGSTSSTAESPGPGSTS | | | |
| | ESPSGTAPGTSPSGESSTAPGTPGSG | | | |
| | TASSSPGSSTPSGATGSPGSSPSAST | | | |
| | GTGPGSEPATSGSETPGTSESATPES | | | |
| | GPGSEPATSGSETPGSTSSTAESPGP | | | |
| | GSTSSTAESPGPGTSPSGESSTAPGS | | | |
| | EPATSGSETPGSEPATSGSETPGTST | | | |
| | EPSEGSAPGSTSSTAESPGPGTSTPES | | | |
| | GSASPGSTSESPSGTAPGTSTEPSEG | | | |
| | SAPGTSTEPSEGSAPGTSTEPSEGSA | | | |
| | PGSSTPSGATGSPGSSPSASTGTGPG | | | |
| | ASPGTSSTGSPGSEPATSGSETPGTS | | | |
| | ESATPESGPGSPAGSPTSTEEGSSTPS | | | |
| | GATGSPGSSPSASTGTGPGASPGTSS | | | |
| | TGSPGTSESATPESGPGTSTEPSEGS | | | |
| | APGTSTEPSEGSAP | | | |
| AM1318 | GTSTEPSEGSAPGSEPATSGSETPGS | 1318 | Residue totals: H: 7 E: 0 | 99.17% |
| | PAGSPTSTEEGSTSSTAESPGPGTST | | percent: H: 0.7 E: 0.0 | |
| | PESGSASPGSTSESPSGTAPGSTSESP | | | |
| | SGTAPGTSTPESGSASPGTSTPESGS | | | |
| | ASPGSEPATSGSETPGTSESATPESG | | | |
| | PGSPAGSPTSTEEGTSTEPSEGSAPG | | | |
| | TSESATPESGPGTSTEPSEGSAPGTS | | | |
| | TEPSEGSAPGSPAGSPTSTEEGTSTE | | | |
| | PSEGSAPGTSTEPSEGSAPGTSESAT | | | |
| | PESGPGTSESATPESGPGTSTEPSEG | | | |
| | SAPGTSTEPSEGSAPGTSESATPESG | | | |
| | PGTSTEPSEGSAPGSEPATSGSETPG | | | |
| | SPAGSPTSTEEGSSTPSGATGSPGTP | | | |
| | GSGTASSSPGSSTPSGATGSPGTSTE | | | |
| | PSEGSAPGTSTEPSEGSAPGSEPATS | | | |
| | GSETPGSPAGSPTSTEEGSPAGSPTS | | | |
| | TEEGTSTEPSEGSAPGPEPTGPAPSG | | | |
| | GSEPATSGSETPGTSESATPESGPGS | | | |
| | PAGSPTSTEEGTSESATPESGPGSPA | | | |
| | GSPTSTEEGSPAGSPTSTEEGTSESA | | | |
| | TPESGPGSPAGSPTSTEEGSPAGSPT | | | |
| | STEEGSTSSTAESPGPGSTSESPSGT | | | |
| | APGTSPSGESSTAPGSTSESPSGTAP | | | |
| | GSTSESPSGTAPGTSPSGESSTAPGT | | | |
| | STEPSEGSAPGTSESATPESGPGTSE | | | |
| | SATPESGPGSEPATSGSETPGTSESA | | | |
| | TPESGPGTSESATPESGPGTSTEPSE | | | |
| | GSAPGTSESATPESGPGTSTEPSEGS | | | |
| | APGTSPSGESSTAPGTSPSGESSTAP | | | |
| | GTSPSGESSTAPGTSTEPSEGSAPGS | | | |
| | PAGSPTSTEEGTSTEPSEGSAPGSSPS | | | |
| | ASTGTGPGSSTPSGATGSPGSSTPSG | | | |
| | ATGSPGSSTPSGATGSPGSSTPSGAT | | | |
| | GSPGASPGTSSTGSPGASASGAPSTG | | | |
| | GTSPSGESSTAPGSTSSTAESPGPGT | | | |
| | SPSGESSTAPGTSESATPESGPGTST | | | |
| | EPSEGSAPGTSTEPSEGSAPGSSPSA | | | |
| | STGTGPGSSTPSGATGSPGASPGTSS | | | |
| | TGSPGTSTPESGSASPGTSPSGESST | | | |
| | APGTSPSGESSTAPGTSESATPESGP | | | |
| | GSEPATSGSETPGTSTEPSEGSAPGS | | | |
| | TSESPSGTAPGSTSESPSGTAPGTSTP | | | |
| | ESGSASPGSPAGSPTSTEEGTSESAT | | | |
| | PESGPGTSTEPSEGSAPGSPAGSPTS | | | |
| | TEEGTSESATPESGPGSEPATSGSET | | | |
| | PGSSTPSGATGSPGASPGTSSTGSPG | | | |
| | SSTPSGATGSPGSTSESPSGTAPGTS | | | |
| | PSGESSTAPGSTSSTAESPGPGSSTPS | | | |
| | GATGSPGASPGTSSTGSPGTPGSGT | | | |
| | ASSSPGSPAGSPTSTEEGSPAGSPTS | | | |
| | TEEGTSTEPSEGSAP | | | |
| AM923 | MAEPAGSPTSTEEGASPGTSSTGSP | 924 | Residue totals: H: 4 E: 3 | 98.70% |
| | GSSTPSGATGSPGSSTPSGATGSPGT | | percent: H: 0.4 E: 0.3 | |
| | STEPSEGSAPGSEPATSGSETPGSPA | | | |
| | GSPTSTEEGSTSSTAESPGPGTSTPES | | | |
| | GSASPGSTSESPSGTAPGSTSESPSG | | | |
| | TAPGTSTPESGSASPGTSTPESGSAS | | | |
| | PGSEPATSGSETPGTSESATPESGPG | | | |
| | SPAGSPTSTEEGTSTEPSEGSAPGTS | | | |
| | ESATPESGPGTSTEPSEGSAPGTSTE | | | |
| | PSEGSAPGSPAGSPTSTEEGTSTEPS | | | |
| | EGSAPGTSTEPSEGSAPGTSESATPE | | | |
| | SGPGTSESATPESGPGTSTEPSEGSA | | | |
| | PGTSTEPSEGSAPGTSESATPESGPG | | | |
| | TSTEPSEGSAPGSEPATSGSETPGSP | | | |
| | AGSPTSTEEGSSTPSGATGSPGTPGS | | | |
| | GTASSSPGSSTPSGATGSPGTSTEPS | | | |
| | EGSAPGTSTEPSEGSAPGSEPATSGS | | | |
| | ETPGSPAGSPTSTEEGSPAGSPTSTE | | | |
| | EGTSTEPSEGSAPGASASGAPSTGG | | | |
| | TSESATPESGPGSPAGSPTSTEEGSP | | | |
| | AGSPTSTEEGSTSSTAESPGPGSTSE | | | |
| | SPSGTAPGTSPSGESSTAPGTPGSGT | | | |
| | ASSSPGSSTPSGATGSPGSSPSASTG | | | |
| | TGPGSEPATSGSETPGTSESATPESG | | | |
| | PGSEPATSGSETPGSTSSTAESPGPG | | | |
| | STSSTAESPGPGTSPSGESSTAPGSEP | | | |
| | ATSGSETPGSEPATSGSETPGTSTEP | | | |
| | SEGSAPGSTSSTAESPGPGTSTPESG | | | |
| | SASPGSTSESPSGTAPGTSTEPSEGS | | | |
| | APGTSTEPSEGSAPGTSTEPSEGSAP | | | |
| | GSSTPSGATGSPGSSPSASTGTGPGA | | | |
| | SPGTSSTGSPGSEPATSGSETPGTSES | | | |
| | ATPESGPGSPAGSPTSTEEGSSTPSG | | | |
| | ATGSPGSSPSASTGTGPGASPGTSST | | | |
| | GSPGTSESATPESGPGTSTEPSEGSA | | | |
| | PGTSTEPSEGSAP | | | |
| AE912 | MAEPAGSPTSTEEGTPGSGTASSSP | 913 | Residue totals: H: 8 E: 3 | 99.45% |
| | GSSTPSGATGSPGASPGTSSTGSPGS | | percent: H: 0.9 E: 0.3 | |
| | PAGSPTSTEEGTSESATPESGPGTST | | | |
| | EPSEGSAPGSPAGSPTSTEEGTSTEP | | | |
| | SEGSAPGTSTEPSEGSAPGTSESATP | | | |
| | ESGPGSEPATSGSETPGSEPATSGSE | | | |
| | TPGSPAGSPTSTEEGTSESATPESGP | | | |
| | GTSTEPSEGSAPGTSTEPSEGSAPGS | | | |
| | PAGSPTSTEEGTSTEPSEGSAPGTST | | | |
| | EPSEGSAPGTSESATPESGPGTSTEP | | | |
| | SEGSAPGTSESATPESGPGSEPATSG | | | |
| | SETPGTSTEPSEGSAPGTSTEPSEGS | | | |
| | APGTSESATPESGPGTSESATPESGP | | | |
| | GSPAGSPTSTEEGTSESATPESGPGS | | | |
| | EPATSGSETPGTSESATPESGPGTST | | | |
| | EPSEGSAPGTSTEPSEGSAPGTSTEP | | | |
| | SEGSAPGTSTEPSEGSAPGTSTEPSE | | | |
| | GSAPGTSTEPSEGSAPGSPAGSPTST | | | |
| | EEGTSTEPSEGSAPGTSESATPESGP | | | |
| | GSEPATSGSETPGTSESATPESGPGS | | | |
| | EPATSGSETPGTSESATPESGPGTST | | | |
| | EPSEGSAPGTSESATPESGPGSPAGS | | | |
| | PTSTEEGSPAGSPTSTEEGSPAGSPT | | | |
| | STEEGTSESATPESGPGTSTEPSEGS | | | |
| | APGTSESATPESGPGSEPATSGSETP | | | |
| | GTSESATPESGPGSEPATSGSETPGT | | | |
| | SESATPESGPGTSTEPSEGSAPGSPA | | | |
| | GSPTSTEEGTSESATPESGPGSEPAT | | | |
| | SGSETPGTSESATPESGPGSPAGSPT | | | |
| | STEEGSPAGSPTSTEEGTSTEPSEGS | | | |
| | APGTSESATPESGPGTSESATPESGP | | | |
| | GTSESATPESGPGSEPATSGSETPGS | | | |
| | EPATSGSETPGSPAGSPTSTEEGTST | | | |
| | EPSEGSAPGTSTEPSEGSAPGSEPAT | | | |
| | SGSETPGTSESATPESGPGTSTEPSE | | | |
| | GSAP | | | |
| BC 864 | GTSTEPSEPGSAGTSTEPSEPGSAGS | | Residue totals: H: 0 E: 0 | 99.77% |
| | EPATSGTEPSGSGASEPTSTEPGSEP | | percent: H: 0 E: 0 | |
| | ATSGTEPSGSEPATSGTEPSGSEPAT | | | |
| | SGTEPSGSGASEPTSTEPGTSTEPSEP | | | |
| | GSAGSEPATSGTEPSGTSTEPSEPGS | | | |
| | AGSEPATSGTEPSGSEPATSGTEPSG | | | |
| | TSTEPSEPGSAGTSTEPSEPGSAGSE | | | |
| | PATSGTEPSGSEPATSGTEPSGTSEP | | | |
| | STSEPGAGSGASEPTSTEPGTSEPST | | | |
| | SEPGAGSEPATSGTEPSGSEPATSGT | | | |
| | EPSGTSTEPSEPGSAGTSTEPSEPGS | | | |
| | AGSGASEPTSTEPGSEPATSGTEPSG | | | |
| | SEPATSGTEPSGSEPATSGTEPSGSE | | | |
| | PATSGTEPSGTSTEPSEPGSAGSEPA | | | |
| | TSGTEPSGSGASEPTSTEPGTSTEPSE | | | |
| | PGSAGSEPATSGTEPSGSGASEPTST | | | |
| | EPGTSTEPSEPGSAGSGASEPTSTEP | | | |
| | GSEPATSGTEPSGSGASEPTSTEPGS | | | |
| | EPATSGTEPSGSGASEPTSTEPGTST | | | |
| | EPSEPGSAGSEPATSGTEPSGSGASE | | | |
| | PTSTEPGTSTEPSEPGSAGSEPATSG | | | |
| | TEPSGTSTEPSEPGSAGSEPATSGTE | | | |
| | PSGTSTEPSEPGSAGTSTEPSEPGSA | | | |
| | GTSTEPSEPGSAGTSTEPSEPGSAGT | | | |
| | STEPSEPGSAGTSTEPSEPGSAGTSE | | | |
| | PSTSEPGAGSGASEPTSTEPGTSTEP | | | |
| | SEPGSAGTSTEPSEPGSAGTSTEPSE | | | |
| | PGSAGSEPATSGTEPSGSGASEPTST | | | |
| | EPGSEPATSGTEPSGSEPATSGTEPS | | | |
| | GSEPATSGTEPSGSEPATSGTEPSGT | | | |
| | SEPSTSEPGAGSEPATSGTEPSGSGA | | | |
| | SEPTSTEPGTSTEPSEPGSAGSEPATS | | | |
| | GTEPSGSGASEPTSTEPGTSTEPSEP | | | |
| | GSA | | | |

* H: alpha-helix E: beta-sheet

### Example 32

### Analysis of Polypeptide Sequences for Repetitiveness

[0697] In this Example, different polypeptides, including several XTEN sequences, were assessed for repetitiveness in the amino acid sequence. Polypeptide amino acid sequences can be assessed for repetitiveness by quantifying the number of times a shorter subsequence appears within the overall polypeptide. For example, a polypeptide of 200 amino acid residues length has a total of 165 overlapping 36-amino acid “blocks” (or “36-mers”) and 198 3-mer “subsequences”, but the number of unique 3-mer subsequences will depend on the amount of repetitiveness within the sequence. For the analyses, different polypeptide sequences were assessed for repetitiveness by determining the subsequence score obtained by application of the following equation:

$$Subsequence score = \frac{{\sum }_{i = 1}^{m} {Count}_{i}}{m} \qquad I$$

[0698] wherein: m=(amino acid length of polypeptide)−(amino acid length of subsequence)+1;

[0699] and Countᵢ=cumulative number of occurrences of each unique subsequence within sequenceᵢ

In the analyses of the present Example, the subsequence score for the polypeptides of Table 19 were determined using the foregoing equation in a computer program using the algorithm depicted in FIG. 3, wherein the subsequence length was set at 3 amino acids. The resulting subsequence score is a reflection of the degree of repetitiveness within the polypeptide.

[0700] The results, shown in Table 19, indicate that the unstructured polypeptides consisting of 2 or 3 amino acid types have high subsequence scores, while those of consisting of the 12 amino acid motifs of the six amino acids G, S, T, E, P, and A with a low degree of internal repetitiveness, have subsequence scores of less than 10, and in some cases, less than 5. For example, the L288 sequence has two amino acid types and has short, highly repetitive sequences, resulting in a subsequence score of 50.0. The polypeptide J288 has three amino acid types but also has short, repetitive sequences, resulting in a subsequence score of 33.3. Y576 also has three amino acid types, but is not made of internal repeats, reflected in the subsequence score of 15.7 over the first 200 amino acids. W576 consists of four types of amino acids, but has a higher degree of internal repetitiveness, e.g., “GGSG”, resulting in a subsequence score of 23.4. The AD576 consists of four types of 12 amino acid motifs, each consisting of four types of amino acids. Because of the low degree of internal repetitiveness of the individual motifs, the overall subsequence score over the first 200 amino acids is 13.6. In contrast, XTEN's consisting of four motifs contains six types of amino acids, each with a low degree of internal repetitiveness have lower subsequence scores; i.e., AE864 (6.1), AF864 (7.5), and AM875 (4.5), while XTEN consisting of four motifs containing five types of amino acids were intermediate; i.e., AE864, with a score of 7.2.

[0701] Conclusions: The results indicate that the combination of 12 amino acid subsequence motifs, each consisting of four to six amino acid types that are non-repetitive, into a longer XTEN polypeptide results in an overall sequence that is substantially non-repetitive, as indicated by overall average subsequence scores less than 10 and, in many cases, less than 5. This is despite the fact that each subsequence motif may be used multiple times across the sequence. In contrast, polymers created from smaller numbers of amino acid types resulted in higher average subsequence scores, with polypeptides consisting of two amino acid type having higher scores that those consisting of three amino acid types.

TABLE 19
Average subsequence score calculations of polypeptide sequences

| | | | |
|---|---|---|---|
| Seq | SEQ ID | | |
| Name | NO: | Amino Acid Sequence | Score |

| | | | |
|---|---|---|---|
| J288 | 783 | GSGGEGGSGGEGGSGGEGGSGGEGGSGGEGGSGGEGGSGGEGGSGGEG | 33.3 |
| | | GSGGEGGSGGEGGSGGEGGSGGEGGSGGEGGSGGEGGSGGEGGSGGEG | |
| | | GSGGEGGSGGEGGSGGEGGSGGEGGSGGEGGSGGEGGSGGEGGSGGEG | |
| | | GSGGEGGSGGEGGSGGEGGSGGEGGSGGEGGSGGEGGSGGEGGSGGEG | |
| | | GSGGEGGSGGEGGSGGEGGSGGEGGSGGEGGSGGEGGSGGEGGSGGEG | |
| | | GSGGEGGSGGEGGSGGEGGSGGEGGSGGEGGSGGEGGSGGEGGSGGEG | |
| K288 | 784 | GEGEGGGEGGEGEGGGEGGEGEGGGEGGEGEGGGEGGEGEGGGEGGEG | 46.9 |
| | | EGGGEGGEGEGGGEGGEGEGGGEGGEGEGGGEGGEGEGGGEGGEGEGG | |
| | | GEGGEGEGGGEGGEGEGGGEGGEGEGGGEGGEGEGGGEGGEGEGGGEG | |
| | | GEGEGGGEGGEGEGGGEGGEGEGGGEGGEGEGGGEGGEGEGGGEGGEG | |
| | | EGGGEGGEGEGGGEGGEGEGGGEGGEGEGGGEGGEGEGGGEGGEGEGG | |
| | | GEGGEGEGGGEGGEGEGGGEGGEGEGGGEGGEGEGGGEGGEGEGGGEG | |
| L288 | 785 | SSESSESSSSESSSESSESSSSESSSESSESSSSESSSESSESSSSESSSESSESSSS | 50.0 |
| | | ESSSESSESSSSESSSESSESSSSESSSESSESSSSESSSESSESSSSESSSESSESS | |
| | | SSESSSESSESSSSESSSESSESSSSESSSESSESSSSESSSESSESSSSESSSESSE | |
| | | SSSSESSSESSESSSSESSSESSESSSSESSSESSESSSSESSSESSESSSSESSSES | |
| | | SESSSSESSSESSESSSSESSSESSESSSSESSSESSESSSSESSSESSESSSSES | |
| Y288 | 786 | GEGSGEGSEGEGSEGSGEGEGSEGSGEGEGGSEGSEGEGGSEGSEGEGGSE | 26.8 |
| | | GSEGEGSGEGSEGEGGSEGSEGEGSGEGSEGEGSEGGSEGEGGSEGSEGEG | |
| | | SGEGSEGEGGEGGSEGEGSEGSGEGEGSGEGSEGEGSEGSGEGEGSGEGSE | |
| | | GEGSEGSGEGEGSEGSGEGEGGSEGSEGEGSEGSGEGEGGEGSGEGEGSG | |
| | | EGSEGEGGGEGSEGEGSGEGGEGEGSEGGSEGEGGSEGGEGEGSEGSGEG | |
| | | EGSEGGSEGEGSEGGSEGEGSEGSGEGEGSEGSGE | |
| Q576 | 787 | GGKPGEGGKPEGGGGKPGGKPEGEGEGKPGGKPEGGGKPGGGEGGKPE | 18.5 |
| | | GGKPEGEGKPGGGEGKPGGKPEGGGGKPEGEGKPGGGGGKPGGKPEGE | |
| | | GKPGGGEGGKPEGKPGEGGEGKPGGKPEGGGEGKPGGGKPGEGGKPGE | |
| | | GKPGGGEGGKPEGGKPEGEGKPGGGEGKPGGKPGEGGKPEGGGEGKPG | |
| | | GKPGEGGEGKPGGGKPEGEGKPGGGKPGGGEGGKPEGEGKPGGKPEGG | |
| | | GEGKPGGKPEGGGKPEGGGEGKPGGGKPGEGGKPGEGEGKPGGKPEGEG | |
| | | KPGGEGGGKPEGKPGGGEGGKPEGGKPGEGGKPEGGKPGEGGEGKPGG | |
| | | GKPGEGGKPEGGGKPEGEGKPGGGGKPGEGGKPEGGKPEGGGEGKPGG | |
| | | GKPEGEGKPGGGEGKPGGKPEGGGGKPGEGGKPEGGKPGGEGGGKPEGE | |
| | | GKPGGKPGEGGGGKPGGKPEGEGKPGEGGEGKPGGKPEGGGEGKPGGKP | |
| | | EGGGEGKPGGGKPGEGGKPEGGGKPGEGGKPGEGGKPEGEGKPGGGEG | |
| | | KPGGKPGEGGKPEGGGEGKPGGKPGGEGGGKPEGGKPGEGGKPEG | |
| U576 | 788 | GEGKPGGKPGSGGGKPGEGGKPGSGEGKPGGKPGSGGSGKPGGKPGEGG | 18.1 |
| | | KPEGGSGGKPGGGGKPGGKPGGEGSGKPGGKPEGGGKPEGGSGGKPGGK | |
| | | PEGGSGGKPGGKPGSGEGGKPGGGKPGGEGKPGSGKPGGEGSGKPGGKP | |
| | | EGGSGGKPGGKPEGGSGGKPGGSGKPGGKPGEGGKPEGGSGGKPGGSGK | |
| | | PGGKPEGGGSGKPGGKPGEGGKPGSGEGGKPGGGKPGGEGKPGSGKPGG | |
| | | EGSGKPGGKPGSGGEGKPGGKPEGGSGGKPGGGKPGGEGKPGSGGKPGE | |
| | | GGKPGSGGGKPGGKPGGEGEGKPGGKPGEGGKPGGEGSGKPGGGGKPG | |
| | | GKPGGEGGKPEGSGKPGGGSGKPGGKPEGGGGKPEGSGKPGGGGKPEGS | |
| | | GKPGGGKPEGGSGGKPGGSGKPGGKPGEGGGKPEGSGKPGGGSGKPGGK | |
| | | PEGGGKPEGGSGGKPGGKPEGGSGGKPGGKPGGEGSGKPGGKPGSGEGG | |
| | | KPGGKPGEGSGGKPGGKPEGGSGGKPGGSGKPGGKPEGGGSGKPGGKPG | |
| | | EGGKPGGEGSGKPGGSGKPG | |
| W576 | 789 | GGSGKPGKPGGSGSGKPGSGKPGGGSGKPGSGKPGGGSGKPGSGKPGGG | 23.4 |
| | | SGKPGSGKPGGGGKPGSGSGKPGGGKPGGSGGKPGGGSGKPGKPGSGGS | |
| | | GKPGSGKPGGGSGGKPGKPGSGGSGGKPGKPGSGGGSGKPGKPGSGGSG | |
| | | GKPGKPGSGGSGGKPGKPGSGGSGKPGSGKPGGGSGKPGSGKPGSGGSG | |
| | | KPGKPGSGGSGKPGSGKPGSGSGKPGSGKPGGGSGKPGSGKPGSGGSGKP | |
| | | GKPGSGGGKPGSGSGKPGGGKPGSGSGKPGGGKPGGSGGKPGGSGGKPG | |
| | | KPGSGGGSGKPGKPGSGGGSGKPGKPGGSGSGKPGSGKPGGGSGKPGSG | |
| | | KPGSGGSGKPGKPGSGGSGGKPGKPGSGGGKPGSGSGKPGGGKPGSGSG | |
| | | KPGGGKPGSGSGKPGGGKPGSGSGKPGGSGKPGSGKPGGGSGGKPGKPG | |
| | | SGGSGKPGSGKPGSGGSGKPGKPGGSGSGKPGSGKPGGGSGKPGSGKPG | |
| | | GGSGKPGSGKPGGGSGKPGSGKPGGGGKPGSGSGKPGGSGGKPGKPGSG | |
| | | GSGGKPGKPGSGGSGKPGSGKPGGGSGGKPGKPGSGG | |
| Y576 | 790 | GEGSGEGSEGEGSEGSGEGEGSEGSGEGEGGSEGSEGEGSEGSGEGEGGE | 15.7 |
| | | GSGEGEGSGEGSEGEGGGEGSEGEGSGEGGEGEGSEGGSEGEGGSEGGEG | |
| | | EGSEGSGEGEGSEGGSEGEGSEGGSEGEGSEGSGEGEGSEGSGEGEGSEGS | |
| | | GEGEGSEGSGEGEGSEGGSEGEGGSEGSEGEGSGEGSEGEGGSEGSEGEG | |
| | | GGEGSEGEGSGEGSEGEGGSEGSEGEGGSEGSEGEGGEGSGEGEGSEGSG | |
| | | EGEGSGEGSEGEGSEGSGEGEGSEGSGEGEGGSEGSEGEGSGEGSEGEGSE | |
| | | GSGEGEGSEGSGEGEGGSEGSEGEGGSEGSEGEGGSEGSEGEGGEGSGEG | |
| | | EGSEGSGEGEGSGEGSEGEGSEGSGEGEGSEGSGEGEGGSEGSEGEGSEGS | |
| | | GEGEGGEGSGEGEGSGEGSEGEGGGEGSEGEGSEGSGEGEGSEGSGEGEG | |
| | | SEGGSEGEGGSEGSEGEGSEGGSEGEGSEGGSEGEGSEGSGEGEGSEGSGE | |
| | | GEGSGEGSEGEGGSEGGEGEGSEGGSEGEGSEGGSEGEGGEGSGEGEGGG | |
| | | EGSEGEGSEGSGEGEGSGEGSE | |
| AE288 | 288 | GTSESATPESGPGSEPATSGSETPGTSESATPESGPGSEPATSGSETPGTSES | 6.0 |
| | | ATPESGPGTSTEPSEGSAPGSPAGSPTSTEEGTSESATPESGPGSEPATSGSE | |
| | | TPGTSESATPESGPGSPAGSPTSTEEGSPAGSPTSTEEGTSTEPSEGSAPGTS | |
| | | ESATPESGPGTSESATPESGPGTSESATPESGPGSEPATSGSETPGSEPATSG | |
| | | SETPGSPAGSPTSTEEGTSTEPSEGSAPGTSTEPSEGSAPGSEPATSGSETPG | |
| | | TSESATPESGPGTSTEPSEGSAP | |
| AG288_1 | 288 | PGASPGTSSTGSPGASPGTSSTGSPGTPGSGTASSSPGSSTPSGATGSPGTPG | 6.9 |
| | | SGTASSSPGSSTPSGATGSPGTPGSGTASSSPGSSTPSGATGSPGSSTPSGAT | |
| | | GSPGSSPSASTGTGPGSSPSASTGTGPGASPGTSSTGSPGTPGSGTASSSPGS | |
| | | STPSGATGSPGSSPSASTGTGPGSSPSASTGTGPGASPGTSSTGSPGASPGTS | |
| | | STGSPGSSTPSGATGSPGSSPSASTGTGPGASPGTSSTGSPGSSPSASTGTGP | |
| | | GTPGSGTASSSPGSSTPSGATGS | |
| AD576 | 791 | GSSESGSSEGGPGSGGEPSESGSSGSSESGSSEGGPGSSESGSSEGGPGSSES | 13.6 |
| | | GSSEGGPGSSESGSSEGGPGSSESGSSEGGPGESPGGSSGSESGSEGSSGPG | |
| | | ESSGSSESGSSEGGPGSSESGSSEGGPGSSESGSSEGGPGSGGEPSESGSSGE | |
| | | SPGGSSGSESGESPGGSSGSESGSGGEPSESGSSGSSESGSSEGGPGSGGEPS | |
| | | ESGSSGSGGEPSESGSSGSEGSSGPGESSGESPGGSSGSESGSGGEPSESGSS | |
| | | GSGGEPSESGSSGSGGEPSESGSSGSSESGSSEGGPGESPGGSSGSESGESPG | |
| | | GSSGSESGESPGGSSGSESGESPGGSSGSESGESPGGSSGSESGSSESGSSEG | |
| | | GPGSGGEPSESGSSGSEGSSGPGESSGSSESGSSEGGPGSGGEPSESGSSGSS | |
| | | ESGSSEGGPGSGGEPSESGSSGESPGGSSGSESGESPGGSSGSESGSSESGSS | |
| | | EGGPGSGGEPSESGSSGSSESGSSEGGPGSGGEPSESGSSGSGGEPSESGSS | |
| | | GESPGGSSGSESGSEGSSGPGESSGSSESGSSEGGPGSEGSSGPGESS | |
| AE576 | 792 | AGSPAGSPTSTEEGTSESATPESGPGTSTEPSEGSAPGSPAGSPTSTEEGTST | 6.1 |
| | | EPSEGSAPGTSTEPSEGSAPGTSESATPESGPGSEPATSGSETPGSEPATSGS | |
| | | ETPGSPAGSPTSTEEGTSESATPESGPGTSTEPSEGSAPGTSTEPSEGSAPGS | |
| | | PAGSPTSTEEGTSTEPSEGSAPGTSTEPSEGSAPGTSESATPESGPGTSTEPSE | |
| | | GSAPGTSESATPESGPGSEPATSGSETPGTSTEPSEGSAPGTSTEPSEGSAPG | |
| | | TSESATPESGPGTSESATPESGPGSPAGSPTSTEEGTSESATPESGPGSEPAT | |
| | | SGSETPGTSESATPESGPGTSTEPSEGSAPGTSTEPSEGSAPGTSTEPSEGSA | |
| | | PGTSTEPSEGSAPGTSTEPSEGSAPGTSTEPSEGSAPGSPAGSPTSTEEGTST | |
| | | EPSEGSAPGTSESATPESGPGSEPATSGSETPGTSESATPESGPGSEPATSGS | |
| | | ETPGTSESATPESGPGTSTEPSEGSAPGTSESATPESGPGSPAGSPTSTEEGS | |
| | | PAGSPTSTEEGSPAGSPTSTEEGTSESATPESGPGTSTEPSEGSAP | |
| AF540 | 793 | GSTSSTAESPGPGSTSSTAESPGPGSTSESPSGTAPGSTSSTAESPGPGSTSST | 8.8 |
| | | AESPGPGTSTPESGSASPGSTSESPSGTAPGTSPSGESSTAPGSTSESPSGTAP | |
| | | GSTSESPSGTAPGTSPSGESSTAPGSTSESPSGTAPGSTSESPSGTAPGTSPSG | |
| | | ESSTAPGSTSESPSGTAPGSTSESPSGTAPGSTSESPSGTAPGTSTPESGSASP | |
| | | GSTSESPSGTAPGTSTPESGSASPGSTSSTAESPGPGSTSSTAESPGPGTSTPE | |
| | | SGSASPGTSTPESGSASPGSTSESPSGTAPGTSTPESGSASPGTSTPESGSASP | |
| | | GSTSESPSGTAPGSTSESPSGTAPGSTSESPSGTAPGSTSSTAESPGPGTSTPE | |
| | | SGSASPGTSTPESGSASPGSTSESPSGTAPGSTSESPSGTAPGTSTPESGSASP | |
| | | GSTSESPSGTAPGSTSESPSGTAPGTSTPESGSASPGTSPSGESSTAPGSTSST | |
| | | AESPGPGTSPSGESSTAPGSTSSTAESPGPGTSTPESGSASPGSTSESPSGTAP | |
| AF504 | 794 | GASPGTSSTGSPGSSPSASTGTGPGSSPSASTGTGPGTPGSGTASSSPGSSTP | 7.0 |
| | | SGATGSPGSNPSASTGTGPGASPGTSSTGSPGTPGSGTASSSPGSSTPSGAT | |
| | | GSPGTPGSGTASSSPGASPGTSSTGSPGASPGTSSTGSPGTPGSGTASSSPGS | |
| | | STPSGATGSPGASPGTSSTGSPGTPGSGTASSSPGSSTPSGATGSPGSNPSAS | |
| | | TGTGPGSSPSASTGTGPGSSTPSGATGSPGSSTPSGATGSPGASPGTSSTGSP | |
| | | GASPGTSSTGSPGASPGTSSTGSPGTPGSGTASSSPGASPGTSSTGSPGASPG | |
| | | TSSTGSPGASPGTSSTGSPGSSPSASTGTGPGTPGSGTASSSPGASPGTSSTG | |
| | | SPGASPGTSSTGSPGASPGTSSTGSPGSSTPSGATGSPGSSTPSGATGSPGAS | |
| | | PGTSSTGSPGTPGSGTASSSPGSSTPSGATGSPGSSTPSGATGSPGSSTPSGA | |
| | | TGSPGSSPSASTGTGPGASPGTSSTGSP | |
| AE864 | 795 | GSPAGSPTSTEEGTSESATPESGPGTSTEPSEGSAPGSPAGSPTSTEEGTSTE | 6.1 |
| | | PSEGSAPGTSTEPSEGSAPGTSESATPESGPGSEPATSGSETPGSEPATSGSE | |
| | | TPGSPAGSPTSTEEGTSESATPESGPGTSTEPSEGSAPGTSTEPSEGSAPGSP | |
| | | AGSPTSTEEGTSTEPSEGSAPGTSTEPSEGSAPGTSESATPESGPGTSTEPSE | |
| | | GSAPGTSESATPESGPGSEPATSGSETPGTSTEPSEGSAPGTSTEPSEGSAPG | |
| | | TSESATPESGPGTSESATPESGPGSPAGSPTSTEEGTSESATPESGPGSEPAT | |
| | | SGSETPGTSESATPESGPGTSTEPSEGSAPGTSTEPSEGSAPGTSTEPSEGSA | |
| | | PGTSTEPSEGSAPGTSTEPSEGSAPGTSTEPSEGSAPGSPAGSPTSTEEGTST | |
| | | EPSEGSAPGTSESATPESGPGSEPATSGSETPGTSESATPESGPGSEPATSGS | |
| | | ETPGTSESATPESGPGTSTEPSEGSAPGTSESATPESGPGSPAGSPTSTEEGS | |
| | | PAGSPTSTEEGSPAGSPTSTEEGTSESATPESGPGTSTEPSEGSAPGTSESAT | |
| | | PESGPGSEPATSGSETPGTSESATPESGPGSEPATSGSETPGTSESATPESGP | |
| | | GTSTEPSEGSAPGSPAGSPTSTEEGTSESATPESGPGSEPATSGSETPGTSES | |
| | | ATPESGPGSPAGSPTSTEEGSPAGSPTSTEEGTSTEPSEGSAPGTSESATPES | |
| | | GPGTSESATPESGPGTSESATPESGPGSEPATSGSETPGSEPATSGSETPGSP | |
| | | AGSPTSTEEGTSTEPSEGSAP | |
| AF864 | 796 | GSTSESPSGTAPGTSPSGESSTAPGSTSESPSGTAPGSTSESPSGTAPGTSTPE | 7.5 |
| | | SGSASPGTSTPESGSASPGSTSESPSGTAPGSTSESPSGTAPGTSPSGESSTAP | |
| | | GSTSESPSGTAPGTSPSGESSTAPGTSPSGESSTAPGSTSSTAESPGPGTSPSG | |
| | | ESSTAPGTSPSGESSTAPGSTSSTAESPGPGTSTPESGSASPGTSTPESGSASP | |
| | | GSTSESPSGTAPGSTSESPSGTAPGTSTPESGSASPGSTSSTAESPGPGTSTPE | |
| | | SGSASPGSTSESPSGTAPGTSPSGESSTAPGSTSSTAESPGPGTSPSGESSTAP | |
| | | GTSTPESGSASPGSTSSTAESPGPGSTSSTAESPGPGSTSSTAESPGPGSTSST | |
| | | AESPGPGTSPSGESSTAPGSTSESPSGTAPGSTSESPSGTAPGTSTPESGPXX | |
| | | XGASASGAPSTXXXXSESPSGTAPGSTSESPSGTAPGSTSESPSGTAPGSTS | |
| | | ESPSGTAPGSTSESPSGTAPGSTSESPSGTAPGTSTPESGSASPGTSPSGESST | |
| | | APGTSPSGESSTAPGSTSSTAESPGPGTSPSGESSTAPGTSTPESGSASPGSTS | |
| | | ESPSGTAPGSTSESPSGTAPGTSPSGESSTAPGSTSESPSGTAPGTSTPESGS | |
| | | ASPGTSTPESGSASPGSTSESPSGTAPGTSTPESGSASPGSTSSTAESPGPGST | |
| | | SESPSGTAPGSTSESPSGTAPGTSPSGESSTAPGSTSSTAESPGPGTSPSGESS | |
| | | TAPGTSTPESGSASPGTSPSGESSTAPGTSPSGESSTAPGTSPSGESSTAPGS | |
| | | TSSTAESPGPGSTSSTAESPGPGTSPSGESSTAPGSSPSASTGTGPGSSTPSG | |
| | | ATGSPGSSTPSGATGSP | |
| AG864 | 864 | GASPGTSSTGSPGSSPSASTGTGPGSSPSASTGTGPGTPGSGTASSSPGSSTP | 7.2 |
| | | SGATGSPGSSPSASTGTGPGASPGTSSTGSPGTPGSGTASSSPGSSTPSGAT | |
| | | GSPGTPGSGTASSSPGASPGTSSTGSPGASPGTSSTGSPGTPGSGTASSSPGS | |
| | | STPSGATGSPGASPGTSSTGSPGTPGSGTASSSPGSSTPSGATGSPGSSPSAS | |
| | | TGTGPGSSPSASTGTGPGSSTPSGATGSPGSSTPSGATGSPGASPGTSSTGSP | |
| | | GASPGTSSTGSPGASPGTSSTGSPGTPGSGTASSSPGASPGTSSTGSPGASPG | |
| | | TSSTGSPGASPGTSSTGSPGSSPSASTGTGPGTPGSGTASSSPGASPGTSSTG | |
| | | SPGASPGTSSTGSPGASPGTSSTGSPGSSTPSGATGSPGSSTPSGATGSPGAS | |
| | | PGTSSTGSPGTPGSGTASSSPGSSTPSGATGSPGSSTPSGATGSPGSSTPSGA | |
| | | TGSPGSSPSASTGTGPGASPGTSSTGSPGASPGTSSTGSPGTPGSGTASSSPG | |
| | | ASPGTSSTGSPGASPGTSSTGSPGASPGTSSTGSPGASPGTSSTGSPGTPGSG | |
| | | TASSSPGSSTPSGATGSPGTPGSGTASSSPGSSTPSGATGSPGTPGSGTASSS | |
| | | PGSSTPSGATGSPGSSTPSGATGSPGSSPSASTGTGPGSSPSASTGTGPGASP | |
| | | GTSSTGSPGTPGSGTASSSPGSSTPSGATGSPGSSPSASTGTGPGSSPSASTG | |
| | | TGPGASPGTSSTGSPGASPGTSSTGSPGSSTPSGATGSPGSSPSASTGTGPG | |
| | | ASPGTSSTGSPGSSPSASTGTGPGTPGSGTASSSPGSSTPSGATGSPGSSTPS | |
| | | GATGSPGASPGTSSTGSP | |
| AG868 | 797 | GGSPGASPGTSSTGSPGSSPSASTGTGPGSSPSASTGTGPGTPGSGTASSSPG | 7.5 |
| | | SSTPSGATGSPGSNPSASTGTGPGASPGTSSTGSPGTPGSGTASSSPGSSTPS | |
| | | GATGSPGTPGSGTASSSPGASPGTSSTGSPGASPGTSSTGSPGTPGSGTASS | |
| | | SPGSSTPSGATGSPGASPGTSSTGSPGTPGSGTASSSPGSSTPSGATGSPGSN | |
| | | PSASTGTGPGSSPSASTGTGPGSSTPSGATGSPGSSTPSGATGSPGASPGTSS | |
| | | TGSPGASPGTSSTGSPGASPGTSSTGSPGTPGSGTASSSPGASPGTSSTGSPG | |
| | | ASPGTSSTGSPGASPGTSSTGSPGSSPSASTGTGPGTPGSGTASSSPGASPGT | |
| | | SSTGSPGASPGTSSTGSPGASPGTSSTGSPGSSTPSGATGSPGSSTPSGATGS | |
| | | PGASPGTSSTGSPGTPGSGTASSSPGSSTPSGATGSPGSSTPSGATGSPGSST | |
| | | PSGATGSPGSSPSASTGTGPGASPGTSSTGSPGASPGTSSTGSPGTPGSGTA | |
| | | SSSPGASPGTSSTGSPGASPGTSSTGSPGASPGTSSTGSPGASPGTSSTGSPG | |
| | | TPGSGTASSSPGSSTPSGATGSPGTPGSGTASSSPGSSTPSGATGSPGTPGSG | |
| | | TASSSPGSSTPSGATGSPGSSTPSGATGSPGSSPSASTGTGPGSSPSASTGTG | |
| | | PGASPGTSSTGSPGTPGSGTASSSPGSSTPSGATGSPGSSPSASTGTGPGSSP | |
| | | SASTGTGPGASPGTSSTGSPGASPGTSSTGSPGSSTPSGATGSPGSSPSASTG | |
| | | TGPGASPGTSSTGSPGSSPSASTGTGPGTPGSGTASSSPGSSTPSGATGSPGS | |
| | | STPSGATGSPGASPGTSSTGSP | |
| AM875 | 798 | GTSTEPSEGSAPGSEPATSGSETPGSPAGSPTSTEEGSTSSTAESPGPGTSTP | 4.5 |
| | | ESGSASPGSTSESPSGTAPGSTSESPSGTAPGTSTPESGSASPGTSTPESGSAS | |
| | | PGSEPATSGSETPGTSESATPESGPGSPAGSPTSTEEGTSTEPSEGSAPGTSE | |
| | | SATPESGPGTSTEPSEGSAPGTSTEPSEGSAPGSPAGSPTSTEEGTSTEPSEG | |
| | | SAPGTSTEPSEGSAPGTSESATPESGPGTSESATPESGPGTSTEPSEGSAPGT | |
| | | STEPSEGSAPGTSESATPESGPGTSTEPSEGSAPGSEPATSGSETPGSPAGSP | |
| | | TSTEEGSSTPSGATGSPGTPGSGTASSSPGSSTPSGATGSPGTSTEPSEGSAP | |
| | | GTSTEPSEGSAPGSEPATSGSETPGSPAGSPTSTEEGSPAGSPTSTEEGTSTE | |
| | | PSEGSAPGASASGAPSTGGTSESATPESGPGSPAGSPTSTEEGSPAGSPTSTE | |
| | | EGSTSSTAESPGPGSTSESPSGTAPGTSPSGESSTAPGTPGSGTASSSPGSSTP | |
| | | SGATGSPGSSPSASTGTGPGSEPATSGSETPGTSESATPESGPGSEPATSGSE | |
| | | TPGSTSSTAESPGPGSTSSTAESPGPGTSPSGESSTAPGSEPATSGSETPGSEP | |
| | | ATSGSETPGTSTEPSEGSAPGSTSSTAESPGPGTSTPESGSASPGSTSESPSGT | |
| | | APGTSTEPSEGSAPGTSTEPSEGSAPGTSTEPSEGSAPGSSTPSGATGSPGSS | |
| | | PSASTGTGPGASPGTSSTGSPGSEPATSGSETPGTSESATPESGPGSPAGSPT | |
| | | STEEGSSTPSGATGSPGSSPSASTGTGPGASPGTSSTGSPGTSESATPESGPG | |
| | | TSTEPSEGSAPGTSTEPSEGSAP | |
| AE912 | 913 | MAEPAGSPTSTEEGTPGSGTASSSPGSSTPSGATGSPGASPGTSSTGSPGSP | 4.5 |
| | | AGSPTSTEEGTSESATPESGPGTSTEPSEGSAPGSPAGSPTSTEEGTSTEPSE | |
| | | GSAPGTSTEPSEGSAPGTSESATPESGPGSEPATSGSETPGSEPATSGSETPG | |
| | | SPAGSPTSTEEGTSESATPESGPGTSTEPSEGSAPGTSTEPSEGSAPGSPAGS | |
| | | PTSTEEGTSTEPSEGSAPGTSTEPSEGSAPGTSESATPESGPGTSTEPSEGSAP | |
| | | GTSESATPESGPGSEPATSGSETPGTSTEPSEGSAPGTSTEPSEGSAPGTSES | |
| | | ATPESGPGTSESATPESGPGSPAGSPTSTEEGTSESATPESGPGSEPATSGSE | |
| | | TPGTSESATPESGPGTSTEPSEGSAPGTSTEPSEGSAPGTSTEPSEGSAPGTS | |
| | | TEPSEGSAPGTSTEPSEGSAPGTSTEPSEGSAPGSPAGSPTSTEEGTSTEPSE | |
| | | GSAPGTSESATPESGPGSEPATSGSETPGTSESATPESGPGSEPATSGSETPG | |
| | | TSESATPESGPGTSTEPSEGSAPGTSESATPESGPGSPAGSPTSTEEGSPAGS | |
| | | PTSTEEGSPAGSPTSTEEGTSESATPESGPGTSTEPSEGSAPGTSESATPESGP | |
| | | GSEPATSGSETPGTSESATPESGPGSEPATSGSETPGTSESATPESGPGTSTE | |
| | | PSEGSAPGSPAGSPTSTEEGTSESATPESGPGSEPATSGSETPGTSESATPES | |
| | | GPGSPAGSPTSTEEGSPAGSPTSTEEGTSTEPSEGSAPGTSESATPESGPGTS | |
| | | ESATPESGPGTSESATPESGPGSEPATSGSETPGSEPATSGSETPGSPAGSPT | |
| | | STEEGTSTEPSEGSAPGTSTEPSEGSAPGSEPATSGSETPGTSESATPESGPG | |
| | | TSTEPSEGSAP | |
| AM923 | 924 | MAEPAGSPTSTEEGASPGTSSTGSPGSSTPSGATGSPGSSTPSGATGSPGTS | 4.5 |
| | | TEPSEGSAPGSEPATSGSETPGSPAGSPTSTEEGSTSSTAESPGPGTSTPESG | |
| | | SASPGSTSESPSGTAPGSTSESPSGTAPGTSTPESGSASPGTSTPESGSASPGS | |
| | | EPATSGSETPGTSESATPESGPGSPAGSPTSTEEGTSTEPSEGSAPGTSESAT | |
| | | PESGPGTSTEPSEGSAPGTSTEPSEGSAPGSPAGSPTSTEEGTSTEPSEGSAP | |
| | | GTSTEPSEGSAPGTSESATPESGPGTSESATPESGPGTSTEPSEGSAPGTSTE | |
| | | PSEGSAPGTSESATPESGPGTSTEPSEGSAPGSEPATSGSETPGSPAGSPTST | |
| | | EEGSSTPSGATGSPGTPGSGTASSSPGSSTPSGATGSPGTSTEPSEGSAPGTS | |
| | | TEPSEGSAPGSEPATSGSETPGSPAGSPTSTEEGSPAGSPTSTEEGTSTEPSE | |
| | | GSAPGASASGAPSTGGTSESATPESGPGSPAGSPTSTEEGSPAGSPTSTEEG | |
| | | STSSTAESPGPGSTSESPSGTAPGTSPSGESSTAPGTPGSGTASSSPGSSTPSG | |
| | | ATGSPGSSPSASTGTGPGSEPATSGSETPGTSESATPESGPGSEPATSGSETP | |
| | | GSTSSTAESPGPGSTSSTAESPGPGTSPSGESSTAPGSEPATSGSETPGSEPA | |
| | | TSGSETPGTSTEPSEGSAPGSTSSTAESPGPGTSTPESGSASPGSTSESPSGTA | |
| | | PGTSTEPSEGSAPGTSTEPSEGSAPGTSTEPSEGSAPGSSTPSGATGSPGSSP | |
| | | SASTGTGPGASPGTSSTGSPGSEPATSGSETPGTSESATPESGPGSPAGSPTS | |
| | | TEEGSSTPSGATGSPGSSPSASTGTGPGASPGTSSTGSPGTSESATPESGPGT | |
| | | STEPSEGSAPGTSTEPSEGSAP | |
| AM1296 | 799 | GTSTEPSEGSAPGSEPATSGSETPGSPAGSPTSTEEGSTSSTAESPGPGTSTP | 4.5 |
| | | ESGSASPGSTSESPSGTAPGSTSESPSGTAPGTSTPESGSASPGTSTPESGSAS | |
| | | PGSEPATSGSETPGTSESATPESGPGSPAGSPTSTEEGTSTEPSEGSAPGTSE | |
| | | SATPESGPGTSTEPSEGSAPGTSTEPSEGSAPGSPAGSPTSTEEGTSTEPSEG | |
| | | SAPGTSTEPSEGSAPGTSESATPESGPGTSESATPESGPGTSTEPSEGSAPGT | |
| | | STEPSEGSAPGTSESATPESGPGTSTEPSEGSAPGSEPATSGSETPGSPAGSP | |
| | | TSTEEGSSTPSGATGSPGTPGSGTASSSPGSSTPSGATGSPGTSTEPSEGSAP | |
| | | GTSTEPSEGSAPGSEPATSGSETPGSPAGSPTSTEEGSPAGSPTSTEEGTSTE | |
| | | PSEGSAPGPEPTGPAPSGGSEPATSGSETPGTSESATPESGPGSPAGSPTSTE | |
| | | EGTSESATPESGPGSPAGSPTSTEEGSPAGSPTSTEEGTSESATPESGPGSPA | |
| | | GSPTSTEEGSPAGSPTSTEEGSTSSTAESPGPGSTSESPSGTAPGTSPSGESST | |
| | | APGSTSESPSGTAPGSTSESPSGTAPGTSPSGESSTAPGTSTEPSEGSAPGTS | |
| | | ESATPESGPGTSESATPESGPGSEPATSGSETPGTSESATPESGPGTSESATP | |
| | | ESGPGTSTEPSEGSAPGTSESATPESGPGTSTEPSEGSAPGTSPSGESSTAPG | |
| | | TSPSGESSTAPGTSPSGESSTAPGTSTEPSEGSAPGSPAGSPTSTEEGTSTEPS | |
| | | EGSAPGSSPSASTGTGPGSSTPSGATGSPGSSTPSGATGSPGSSTPSGATGSP | |
| | | GSSTPSGATGSPGASPGTSSTGSPGASASGAPSTGGTSPSGESSTAPGSTSST | |
| | | AESPGPGTSPSGESSTAPGTSESATPESGPGTSTEPSEGSAPGTSTEPSEGSA | |
| | | PGSSPSASTGTGPGSSTPSGATGSPGASPGTSSTGSPGTSTPESGSASPGTSP | |
| | | SGESSTAPGTSPSGESSTAPGTSESATPESGPGSEPATSGSETPGTSTEPSEG | |
| | | SAPGSTSESPSGTAPGSTSESPSGTAPGTSTPESGSASPGSPAGSPTSTEEGT | |
| | | SESATPESGPGTSTEPSEGSAPGSPAGSPTSTEEGTSESATPESGPGSEPATS | |
| | | GSETPGSSTPSGATGSPGASPGTSSTGSPGSSTPSGATGSPGSTSESPSGTAP | |
| | | GTSPSGESSTAPGSTSSTAESPGPGSSTPSGATGSPGASPGTSSTGSPGTPGS | |
| | | GTASSSPGSPAGSPTSTEEGSPAGSPTSTEEGTSTEPSEGSAP | |

### Example 33

### Calculation of TEPITOPE Scores

[0702] TEPITOPE scores of 9 mer peptide sequence can be calculated by adding pocket potentials as described by Sturniolo [Sturniolo, T., et al. (1999) Nat Biotechnol, 17: 555]. In the present Example, separate Tepitope scores were calculated for individual HLA alleles. Table 20 shows as an example the pocket potentials for HLA*0101B, which occurs in high frequency in the Caucasian population. To calculate the TEPITOPE score of a peptide with sequence P1-P2-P3-P4-P5-P6-P7-P8-P9, the corresponding individual pocket potentials in Table 20 were added. The HLA*0101B score of a 9 mer peptide with the sequence FDKLPRTSG is the sum of 0, −1.3, 0, 0.9, 0, −1.8, 0.09, 0, 0.

[0703] To evaluate the TEPITOPE scores for long peptides one can repeat the process for all 9 mer subsequences of the sequences. This process can be repeated for the proteins encoded by other HLA alleles. Tables 21-24 give pocket potentials for the protein products of HLA alleles that occur with high frequency in the Caucasian population.

[0704] TEPITOPE scores calculated by this method range from approximately −10 to +10. However, 9 mer peptides that lack a hydrophobic amino acid (FKLMVWY) in P1 position have calculated TEPITOPE scores in the range of −1009 to −989. This value is biologically meaningless and reflects the fact that a hydrophobic amino acid serves as an anchor residue for HLA binding and peptides lacking a hydrophobic residue in P1 are considered non binders to HLA. Because most XTEN sequences lack hydrophobic residues, all combinations of 9 mer subsequences will have TEPITOPEs in the range in the range of −1009 to −989. This method confirms that XTEN polypeptides may have few or no predicted T-cell epitopes.

TABLE 20
Pocket potential for HLA*0101B allele.

| Amino Acid | P1 | P2 | P3 | P4 | P5 | P6 | P7 | P8 | P9 |
|---|---|---|---|---|---|---|---|---|---|
| A | −999 | 0 | 0 | 0 | — | 0 | 0 | — | 0 |
| C | −999 | 0 | 0 | 0 | — | 0 | 0 | — | 0 |
| D | −999 | −1.3 | −1.3 | −2.4 | — | −2.7 | −2 | — | −1.9 |
| E | −999 | 0.1 | −1.2 | −0.4 | — | −2.4 | −0.6 | — | −1.9 |
| F | 0 | 0.8 | 0.8 | 0.08 | — | −2.1 | 0.3 | — | −0.4 |
| G | −999 | 0.5 | 0.2 | −0.7 | — | −0.3 | −1.1 | — | −0.8 |
| H | −999 | 0.8 | 0.2 | −0.7 | — | −2.2 | 0.1 | — | −1.1 |
| I | −1 | 1.1 | 1.5 | 0.5 | — | −1.9 | 0.6 | — | 0.7 |
| K | −999 | 1.1 | 0 | −2.1 | — | −2 | −0.2 | — | −1.7 |
| L | −1 | 1 | 1 | 0.9 | — | −2 | 0.3 | — | 0.5 |
| M | −1 | 1.1 | 1.4 | 0.8 | — | −1.8 | 0.09 | — | 0.08 |
| N | −999 | 0.8 | 0.5 | 0.04 | — | −1.1 | 0.1 | — | −1.2 |
| P | −999 | −0.5 | 0.3 | −1.9 | — | −0.2 | 0.07 | — | −1.1 |
| Q | −999 | 1.2 | 0 | 0.1 | — | −1.8 | 0.2 | — | −1.6 |
| R | −999 | 2.2 | 0.7 | −2.1 | — | −1.8 | 0.09 | — | −1 |
| S | −999 | −0.3 | 0.2 | −0.7 | — | −0.6 | −0.2 | — | −0.3 |
| T | −999 | 0 | 0 | −1 | — | −1.2 | 0.09 | — | −0.2 |
| V | −1 | 2.1 | 0.5 | −0.1 | — | −1.1 | 0.7 | — | 0.3 |
| W | 0 | −0.1 | 0 | −1.8 | — | −2.4 | −0.1 | — | −1.4 |
| Y | 0 | 0.9 | 0.8 | −1.1 | — | −2 | 0.5 | — | −0.9 |

TABLE 21
Pocket potential for HLA*0301B allele.

| Amino acid | P1 | P2 | P3 | P4 | P5 | P6 | P7 | P8 | P9 |
|---|---|---|---|---|---|---|---|---|---|
| A | −999 | 0 | 0 | 0 | — | 0 | 0 | — | 0 |
| C | −999 | 0 | 0 | 0 | — | 0 | 0 | — | 0 |
| D | −999 | −1.3 | −1.3 | 2.3 | — | −2.4 | −0.6 | — | −0.6 |
| E | −999 | 0.1 | −1.2 | −1 | — | −1.4 | −0.2 | — | −0.3 |
| F | −1 | 0.8 | 0.8 | −1 | — | −1.4 | 0.5 | — | 0.9 |
| G | −999 | 0.5 | 0.2 | 0.5 | — | −0.7 | 0.1 | — | 0.4 |
| H | −999 | 0.8 | 0.2 | 0 | — | −0.1 | −0.8 | — | −0.5 |
| I | 0 | 1.1 | 1.5 | 0.5 | — | 0.7 | 0.4 | — | 0.6 |
| K | −999 | 1.1 | 0 | −1 | — | 1.3 | −0.9 | — | −0.2 |
| L | 0 | 1 | 1 | 0 | — | 0.2 | 0.2 | — | −0 |
| M | 0 | 1.1 | 1.4 | 0 | — | −0.9 | 1.1 | — | 1.1 |
| N | −999 | 0.8 | 0.5 | 0.2 | — | −0.6 | −0.1 | — | −0.6 |
| P | −999 | −0.5 | 0.3 | −1 | — | 0.5 | 0.7 | — | −0.3 |
| Q | −999 | 1.2 | 0 | 0 | — | −0.3 | −0.1 | — | −0.2 |
| R | −999 | 2.2 | 0.7 | −1 | — | 1 | −0.9 | — | 0.5 |
| S | −999 | −0.3 | 0.2 | 0.7 | — | −0.1 | 0.07 | — | 1.1 |
| T | −999 | 0 | 0 | −1 | — | 0.8 | −0.1 | — | −0.5 |
| V | 0 | 2.1 | 0.5 | 0 | — | 1.2 | 0.2 | — | 0.3 |
| W | −1 | −0.1 | 0 | −1 | — | −1.4 | −0.6 | — | −1 |
| Y | −1 | 0.9 | 0.8 | −1 | — | −1.4 | −0.1 | — | 0.3 |

TABLE 22
Pocket potential for HLA*0401B allele.

| Amino acid | P1 | P2 | P3 | P4 | P5 | P6 | P7 | P8 | P9 |
|---|---|---|---|---|---|---|---|---|---|
| A | −999 | 0 | 0 | 0 | — | 0 | 0 | — | 0 |
| C | −999 | 0 | 0 | 0 | — | 0 | 0 | — | 0 |
| D | −999 | −1.3 | −1.3 | 1.4 | — | −1.1 | −0.3 | — | −1.7 |
| E | −999 | 0.1 | −1.2 | 1.5 | — | −2.4 | 0.2 | — | −1.7 |
| F | 0 | 0.8 | 0.8 | −0.9 | — | −1.1 | −1 | — | −1 |
| G | −999 | 0.5 | 0.2 | −1.6 | — | −1.5 | −1.3 | — | −1 |
| H | −999 | 0.8 | 0.2 | 1.1 | — | −1.4 | 0 | — | 0.08 |
| I | −1 | 1.1 | 1.5 | 0.8 | — | −0.1 | 0.08 | — | −0.3 |
| K | −999 | 1.1 | 0 | −1.7 | — | −2.4 | −0.3 | — | −0.3 |
| L | −1 | 1 | 1 | 0.8 | — | −1.1 | 0.7 | — | −1 |
| M | −1 | 1.1 | 1.4 | 0.9 | — | −1.1 | 0.8 | — | −0.4 |
| N | −999 | 0.8 | 0.5 | 0.9 | — | 1.3 | 0.6 | — | −1.4 |
| P | −999 | −0.5 | 0.3 | −1.6 | — | 0 | −0.7 | — | −1.3 |
| Q | −999 | 1.2 | 0 | 0.8 | — | −1.5 | 0 | — | 0.5 |
| R | −999 | 2.2 | 0.7 | −1.9 | — | −2.4 | −1.2 | — | −1 |
| S | −999 | −0.3 | 0.2 | 0.8 | — | 1 | −0.2 | — | 0.7 |
| T | −999 | 0 | 0 | 0.7 | — | 1.9 | −0.1 | — | −1.2 |
| V | −1 | 2.1 | 0.5 | −0.9 | — | 0.9 | 0.08 | — | −0.7 |
| W | 0 | −0.1 | 0 | −1.2 | — | −1 | −1.4 | — | −1 |
| Y | 0 | 0.9 | 0.8 | −1.6 | — | −1.5 | −1.2 | — | −1 |

TABLE 23
Pocket potential for HLA*0701B allele.

| Amino acid | P1 | P2 | P3 | P4 | P5 | P6 | P7 | P8 | P9 |
|---|---|---|---|---|---|---|---|---|---|
| A | −999 | 0 | 0 | 0 | — | 0 | 0 | — | 0 |
| C | −999 | 0 | 0 | 0 | — | 0 | 0 | — | 0 |
| D | −999 | −1.3 | −1.3 | −1.6 | — | −2.5 | −1.3 | — | −1.2 |
| E | −999 | 0.1 | −1.2 | −1.4 | — | −2.5 | 0.9 | — | −0.3 |
| F | 0 | 0.8 | 0.8 | 0.2 | — | −0.8 | 2.1 | — | 2.1 |
| G | −999 | 0.5 | 0.2 | −1.1 | — | −0.6 | 0 | — | −0.6 |
| H | −999 | 0.8 | 0.2 | 0.1 | — | −0.8 | 0.9 | — | −0.2 |
| I | −1 | 1.1 | 1.5 | 1.1 | — | −0.5 | 2.4 | — | 3.4 |
| K | −999 | 1.1 | 0 | −1.3 | — | −1.1 | 0.5 | — | −1.1 |
| L | −1 | 1 | 1 | −0.8 | — | −0.9 | 2.2 | — | 3.4 |
| M | −1 | 1.1 | 1.4 | −0.4 | — | −0.8 | 1.8 | — | 2 |
| N | −999 | 0.8 | 0.5 | −1.1 | — | −0.6 | 1.4 | — | −0.5 |
| P | −999 | −0.5 | 0.3 | −1.2 | — | −0.5 | −0.2 | — | −0.6 |
| Q | −999 | 1.2 | 0 | −1.5 | — | −1.1 | 1.1 | — | −0.9 |
| R | −999 | 2.2 | 0.7 | −1.1 | — | −1.1 | 0.7 | — | −0.8 |
| S | −999 | −0.3 | 0.2 | 1.5 | — | 0.6 | 0.4 | — | −0.3 |
| T | −999 | 0 | 0 | 1.4 | — | −0.1 | 0.9 | — | 0.4 |
| V | −1 | 2.1 | 0.5 | 0.9 | — | 0.1 | 1.6 | — | 2 |
| W | 0 | −0.1 | 0 | −1.1 | — | −0.9 | 1.4 | — | 0.8 |
| Y | 0 | 0.9 | 0.8 | −0.9 | — | −1 | 1.7 | — | 1.1 |

TABLE 24
Pocket potential for HLA*1501B allele.

| Amino acid | P1 | P2 | P3 | P4 | P5 | P6 | P7 | P8 | P9 |
|---|---|---|---|---|---|---|---|---|---|
| A | −999 | 0 | 0 | 0 | — | 0 | 0 | — | 0 |
| C | −999 | 0 | 0 | 0 | — | 0 | 0 | — | 0 |
| D | −999 | −1.3 | −1.3 | −0.4 | — | −0.4 | −0.7 | — | −1.9 |
| E | −999 | 0.1 | −1.2 | −0.6 | — | −1 | −0.7 | — | −1.9 |
| F | −1 | 0.8 | 0.8 | 2.4 | — | −0.3 | 1.4 | — | −0.4 |
| G | −999 | 0.5 | 0.2 | 0 | — | 0.5 | 0 | — | −0.8 |
| H | −999 | 0.8 | 0.2 | 1.1 | — | −0.5 | 0.6 | — | −1.1 |
| I | 0 | 1.1 | 1.5 | 0.6 | — | 0.05 | 1.5 | — | 0.7 |
| K | −999 | 1.1 | 0 | −0.7 | — | −0.3 | −0.3 | — | −1.7 |
| L | 0 | 1 | 1 | 0.5 | — | 0.2 | 1.9 | — | 0.5 |
| M | 0 | 1.1 | 1.4 | 1 | — | 0.1 | 1.7 | — | 0.08 |
| N | −999 | 0.8 | 0.5 | −0.2 | — | 0.7 | 0.7 | — | −1.2 |
| P | −999 | −0.5 | 0.3 | −0.3 | — | −0.2 | 0.3 | — | −1.1 |
| Q | −999 | 1.2 | 0 | −0.8 | — | −0.8 | −0.3 | — | −1.6 |
| R | −999 | 2.2 | 0.7 | 0.2 | — | 1 | −0.5 | — | −1 |
| S | −999 | −0.3 | 0.2 | −0.3 | — | 0.6 | 0.3 | — | −0.3 |
| T | −999 | 0 | 0 | −0.3 | — | −0 | 0.2 | — | −0.2 |
| V | 0 | 2.1 | 0.5 | 0.2 | — | −0.3 | 0.3 | — | 0.3 |
| W | −1 | −0.1 | 0 | 0.4 | — | −0.4 | 0.6 | — | −1.4 |
| Y | −1 | 0.9 | 0.8 | 2.5 | — | 0.4 | 0.7 | — | −0.9 |

### Example 34

### Analysis of FVIII for XTEN Insertion Sites

[0705] The selection of XTEN insertion sites within the factor VIII molecule was performed by predicting the locations of permissive sites within loop structures or otherwise flexible surface exposed structural elements. For these analyses, the atomic coordinates of two independently determined X-ray crystallographic structures of FVIII were use (Shen B W, et al. The tertiary structure and domain organization of coagulation factor VIII. Blood. (2008) Feb 1; 111(3):1240-1247; Ngo J C, et al. Crystal structure of human factorVIII: implications for the formation of the factor IXa-factor VIIIa complex. Structure (2008)16(4):597-606), as well as those of factor VIII and factor VIIIa derived from molecular dynamic simulation (MDS) (Venkateswarlu, D. Structural investigation of zymogenic and activated forms of human blood coagulation factor VIII: a computational molecular dynamics study. BMC Struct Biol. (2010) 10:7). Atomic coordinates in Protein Data Bank (PDB) format were analyzed to identify regions of the FVIII/FVIIIa predicted to have a high degree solvent accessible surface area using the algorithms ASAView (Ahmad S, et al. ASAView: database and tool for solvent accessibility representation in proteins. BMC Bioinformatics (2004) 5:51) and GetArea (Rychkov G, Petukhov M. Joint neighbors approximation of macromolecular solvent accessible surface area. J Comput Chem (2007) 28(12):1974-1989). The resulting set of sites was then further prioritized on the basis of high predicted atomic positional fluctuation based on the basis of the published results of the MDS study. Sites within the acidic peptide regions flanking the A1, A2, and A3 domains, as well as those that appeared by visual inspection to be in areas other than surface exposed loops were deprioritized. The resulting set of potential sites was evaluated on the basis of interspecies sequence conservation, with those sites in regions of high sequence conservation among 20 vertebrate species being ranked more favorably. Additionally, putative clearance receptor binding sites, FVIII interaction sites with other molecules (such as vWF, FIX), domain and exon boundaries were also considered in fusion site selection. Finally, sites within close proximity to mutations implicated in hemophilia A listed in the Haemophilia A Mutation, Search, Test and Resource Site (HAMSTeRS) database were eliminated (Kemball-Cook G, et al. The factor VIII Structure and Mutation Resource Site: HAMSTeRS version 4. Nucleic Acids Res. (1998) 26(1):216-219). Based on these criteria, the construction of 42 FVIII-XTEN variants was proposed (Table 25). Of these, three represent XTEN insertions within the residual B domain sequence, two represent extensions to the C-terminus of the factor VIII molecule, and 37 represent XTEN insertions within structurally defined inter- and intradomain structural elements.

TABLE 25
FVIII XTEN insertion sites and construct designations

| Construct | | Upstream | Downstream | Upstream | Downstream | XTEN |
|---|---|---|---|---|---|---|
| Number | Domain | Residue No.* | Residue No.* | Sequence | Sequence | Sequence |
| F8X-1 | A1 | 3 | 4 | ATR | RYY | AE42 |
| F8X-2 | A1 | 18 | 19 | YMQ | SDL | AE42 |
| F8X-3 | A1 | 22 | 23 | DLG | ELP | AE42 |
| F8X-4 | A1 | 26 | 27 | LPV | DAR | AE42 |
| F8X-5 | A1 | 40 | 41 | FPF | NTS | AE42 |
| F8X-6 | A1 | 60 | 61 | LFN | IAK | AE42 |
| F8X-7 | A1 | 116 | 117 | YDD | QTS | AE42 |
| F8X-8 | A1 | 130 | 131 | VFP | GGS | AE42 |
| F8X-9 | A1 | 188 | 189 | KEK | TQT | AE42 |
| F8X-10 | A1 | 216 | 217 | NSL | MQD | AE42 |
| F8X-11 | A1 | 230 | 231 | WPK | MHT | AE42 |
| F8X-12 | A1 | 333 | 334 | EEP | QLR | AE42 |
| F8X-13 | A2 | 375 | 376 | SVA | KKH | AE42 |
| F8X-14 | A2 | 403 | 404 | APD | DRS | AE42 |
| F8X-15 | A2 | 442 | 443 | EAI | QHE | AE42 |
| F8X-16 | A2 | 490 | 491 | RRL | PKG | AE42 |
| F8X-17 | A2 | 518 | 519 | TVE | DGP | AE42 |
| F8X-18 | A2 | 599 | 600 | NPA | GVQ | AE42 |
| F8X-19 | A2 | 713 | 714 | CDK | NTG | AE42 |
| F8X-20 | BD | 745 | 746 | SQN | PPV | AE42 |
| F8X-21 | BD | 745 | 746 | SQN | PPV | AE288 |
| F8X-22 | BD** | 745 | 746 | SQN | PPV | AE288 |
| F8X-23 | A3 | 1720 | 1721 | APT | KDE | AE42 |
| F8X-24 | A3 | 1796 | 1797 | EDQ | RQG | AE42 |
| F8X-25 | A3 | 1802 | 1803 | AEP | RKN | AE42 |
| F8X-26 | A3 | 1827 | 1828 | PTK | DEF | AE42 |
| F8X-27 | A3 | 1861 | 1862 | HTN | TLN | AE42 |
| F8X-28 | A3 | 1896 | 1897 | NME | RNC | AE42 |
| F8X-29 | A3 | 1900 | 1901 | NCR | APC | AE42 |
| F8X-30 | A3 | 1904 | 1905 | PCN | IQM | AE42 |
| F8X-31 | A3 | 1937 | 1938 | AQD | QRI | AE42 |
| F8X-32 | C1 | 2019 | 2020 | YSN | KCQ | AE42 |
| F8X-33 | C1 | 2068 | 2069 | EPF | SWI | AE42 |
| F8X-34 | C1 | 2111 | 2112 | GKK | WQT | AE42 |
| F8X-35 | C1 | 2120 | 2121 | NST | GTL | AE42 |
| F8X-36 | C2 | 2171 | 2172 | CDL | NSC | AE42 |
| F8X-37 | C2 | 2188 | 2189 | SDA | QIT | AE42 |
| F8X-38 | C2 | 2227 | 2228 | NPK | EWL | AE42 |
| F8X-39 | C2 | 2277 | 2278 | FQN | GKV | AE42 |
| F8X-40 | CT | 2332 | NA | DLY | NA | AE288 |
| F8X-41 | CT | 2332 | NA | DLY | NA | AG288 |
| F8X-42 | A1 | 3 | 4 | ATR | ATR | AE42 |

*Indicates the amino acid number of the mature FVIII protein
**denotes a construct in which the processing site at R1648 is mutated to alanine to prevent proteolytic processing of FVIII at that location

### Example 35

### Functional Analysis of FVIII-XTEN Constructs

[0706] Two FVIII-XTEN fusion proteins, FVIII-AE288 (F8X-40) and FVIII-AG288 (F8X-41), contain an AE288 XTEN or an AE288 XTEN, respectively, fused at the C-terminus of FVIII C2 domain. To determine if FVIII activity was retained after XTEN fusion, HEK293 cells were transfected separately with these two FVIII-XTEN fusion constructs by using polyethylenimine (PEI) in serum-free medium. At 3 or 5 days post-transfection, the cell culture supernatant was tested for FVIII activity by a two-stage chromogenic assay. Purified recombinant FVIII, calibrated against WHO international standard, was used to establish the standard curve in the chromogeinic assay. The fusion protein products of both F8X-40 and F8X-41 constructs were expressed at levels comparable to those of wild-type BDD-FVIII constructs. (Table 26).

TABLE 26
FVIII Titer of FVIII-XTEN fusion proteins in transient
transfection cell culture

| FVIII Moleeules | | FVIII 066^{a} | pBC 0114^{a} | F8X-40 | F8X-41 |
|---|---|---|---|---|---|
| FVIII activity | Sample A | 6.42 | 6.68 | 7.47 | 3.32^{b} |
| (IU/ml) | Sample B | 7.13 | 7.61 | 8.25 | Not done |

^{a}Both FVIII 066 and pBC 0114 contain B-domain deleted FVIII without XTEN fusion.
^{b}The F8X-41 sample was from a 3-day transfection while other samples were from a 5-day transient transfection.

### Example 35

### Functional Analysis of FVIII-XTEN Constructs

[0707] The half-life extension potential of the F8X-40 and F8X-41 constructs was evaluated in FVIII and von Willebrand factor double knock-out mice by hydrodynamic plasmid DNA injection, with a FVIIIFc DNA construct serving as a positive control. Mice were randomly divided into 3 groups with 4 mice per group. Plasmid DNA encoding BDD FVIIIFc fusion protein, F8X-40 or F8X-41, all sharing the same DNA vector backbone, was administered to mice in the respective groups. Approximately 100 micrograms of the appropriate plasmid DNA was injected into each mouse via hydrodynamic injection, and blood plasma samples were collected at 24 hours and 48 hours post-injection. The plasma FVIII activity was measured by a two-stage chromogenic assay using calibrated recombinant FVIII as a standard. As shown in FIG. 21, samples from the F8X-40 and F8X-41 groups showed higher plasma FVIII titers than did those from the BDD FVIIIFc, suggesting FVIII fusion with XTEN prolongs the half-life of FVIII in vivo. Taken together, these data support the conclusion that FVIII-XTEN fusion proteins retained FVIII activity in transient transfection and exhibited prolonged circulating half-life in an animal model.

TABLE 27
Exemplary Biological Activity, Exemplary Assays and Preferred Indications

| Biologically Active | | Exemplary Activity | |
|---|---|---|---|
| Protein | Biological Activity | Assays | Preferred Indication: |
| Factor VIII | Coagulation factor VIII is a | Chromogenix assay | Hemophilia A; |
| (Factor VIII; | factor essential for | (Rosen S, Scand J | bleeding; |
| Octocog alfa; | hemostasis. This gene | Haematol (1984) 33 | Factor VIII |
| Moroctocog | encodes coagulation | (Suppl 40): 139-45); | deficiency; |
| alfa; | factor VIII, which participates | Chromogenix | bleeding episodes in |
| Recombinant | in the intrinsic pathway of | Coamatic ® Factor VIII | patients with factor |
| Antihemophilic | blood coagulation; factor VIII | assay; one-stage | VIII inhibitor; |
| factor; | is a cofactor for factor IXa | clotting assay | Surgery-related |
| Nordiate; | which, in the presence of Ca + | (Lethagen, S., et al., | hemorrhagic |
| ReFacto; | 2 and phospholipids, | Scandinavian J | episodes |
| Kogenate; | converts factor X to the | Haematology (1986) | |
| Kogenate | activated form Xa. This gene | 37: 448-453. | |
| SF; Helixate; | produces two alternatively | One-stage clotting | |
| Recombinate) | spliced transcripts. | assay and two-stage | |
| | Transcript variant I encodes | clotting assay | |
| | a large glycoprotein, isoform | (Barrowcliffe T W, | |
| | a, which circulates in plasma | Semin Thromb | |
| | and associates with von | Hemost. (2002) | |
| | Willebrand | 28(3): 247-256); | |
| | factor in a noncovalent | Development of a | |
| | complex. This protein | simple | |
| | undergoes multiple | chromogenic factor VIII | |
| | cleavage events. Transcript | assay for | |
| | variant 2 encodes a putative | clinical use. | |
| | small protein, isoform b, | (Wagenvoord R J, | |
| | which consists primarily of | Hendrix H H, | |
| | the phospholipid binding | Hemker H C. | |
| | domain of factor VIIIc. This | Haemostasis | |
| | binding domain is essential | 1989; 19(4): 196-204) | |
| | for coagulant activity. | | |
| | Defects in this gene results | | |
| | in hemophilia A, a common | | |
| | recessive X-linked | | |
| | coagulation disorder. | | |

TABLE 28
Exemplary CFXTEN comprising FVIII and terminal XTEN

| CFXTEN | |
|---|---|
| Name* | Amino Acid Sequence |
| FVIII- | ATRRYYLGAVELSWDYMQSDLGELPVDARFPPRVPKSFPFNTSVVYKKTLFVEFTDHLFNIAK |
| AE144 | PRPPWMGLLGPTIQAEVYDTVVITLKNMASHPVSLHAVGVSYWKASEGAEYDDQTSQREKED |
| | DKVFPGGSHTYVWQVLKENGPMASDPLCLTYSYLSHVDLVKDLNSGLIGALLVCREGSLAKE |
| | KTQTLHKFILLFAVFDEGKSWHSETKNSLMQDRDAASARAWPKMHTVNGYVNRSLPGLIGCH |
| | RKSVYWHVIGMGTTPEVHSIFLEGHTFLVRNHRQASLEISPITFLTAQTLLMDLGQFLLFCHISS |
| | HQHDGMEAYVKVDSCPEEPQLRMKNNEEAEDYDDDLTDSEMDVVRFDDDNSPSFIQIRSVAK |
| | KHPKTWVHYIAALEEDWDYAPLVLAPDDRSYKSQYLNNGPQRIGRKYKKVRFMAYTDETFK |
| | TREAIQHESGILGPLLYGEVGDTLLIIFKNQASRPYNIYPHGITDVRPLYSRRLPKGVKHLKDFPI |
| | LPGEIFKYKWTVTVEDGPTKSDPRCLTRYYSSFVNMERDLASGLIGPLLICYKESVDQRGNQIM |
| | SDKRNVILFSVFDENRSWYLTENIQRFLPNPAGVQLEDPEFQASNIMHSINGYVFDSLQLSVCL |
| | HEVAYWYILSIGAQTDFLSVFFSGYTFKHKMVYEDTLTLFPFSGETVFMSMENPGLWILGCHN |
| | SDFRNRGMTALLKVSSCDKNTGDYYEDSYEDISAYLLSKNNAIEPRSFSQNSRHPSTRQKQFN |
| | ATTIPENDIEKTDPWFAHRTPMPKIQNVSSSDLLMLLRQSPTPHGLSLSDLQEAKYETFSDDPSP |
| | GAIDSNNSLSEMTHFRPQLHHSGDMVFTPESGLQLRLNEKLGTTAATELKKLDFKVSSTSNNLI |
| | STIPSDNLAAGTDNTSSLGPPSMPVHYDSQLDTTLFGKKSSPLTESGGPLSLSEENNDSKLLESG |
| | LMNSQESSWGKNVSSTESGRLFKGKRAHGPALLTKDNALFKVSISLLKTNKTSNNSATNRKTH |
| | IDGPSLLIENSPSVWQNILESDTEFKKVTPLIHDRMLMDKNATALRLNHMSNKTTSSKNMEMV |
| | QQKKEGPIPPDAQNPDMSFFKMLFLPESARWIQRTHGKNSLNSGQGPSPKQLVSLGPEKSVEG |
| | QNFLSEKNKVVVGKGEFTKDVGLKEMVFPSSRNLFLTNLDNLHENNTHNQEKKIQEEIEKKET |
| | LIQENVVLPQIHTVTGTKNFMKNLFLLSTRQNVEGSYDGAYAPVLQDFRSLNDSTNRTKKHTA |
| | HFSKKGEEENLEGLGNQTKQIVEKYACTTRISPNTSQQNFVTQRSKRALKQFRLPLEETELEKRI |
| | IVDDTSTQWSKNMKHLTPSTLTQIDYNEKEKGAITQSPLSDCLTRSHSIPQANRSPLPIAKVSSFP |
| | SIRPIYLTRVLFQDNSSHLPAASYRKKDSGVQESSHFLQGAKKNNLSLAILTLEMTGDQREVGS |
| | LGTSATNSVTYKKVENTVLPKPDLPKTSGKVELLPKVHIYQKDLFPTETSNGSPGHLDLVEGSL |
| | LQGTEGAIKWNEANRPGKVPFLRVATESSAKTPSKLLDPLAWDNHYGTQIPKEEWKSQEKSPE |
| | KTAFKKKDTILSLNACESNHAIAAINEGQNKPEIEVTWAKQGRTERLCSQNPPVLKRHQREITR |
| | TTLQSDQEEIDYDDTISVEMKKEDFDIYDEDENQSPRSFQKKTRHYFIAAVERLWDYGMSSSPH |
| | VLRNRAQSGSVPQFKKVVFQEFTDGSFTQPLYRGELNEHLGLLGPYIRAEVEDNIMVTFRNQA |
| | SRPYSFYSSLISYEEDQRQGAEPRKNFVKPNETKTYFWKVQHHMAPTKDEFDCKAWAYFSDV |
| | DLEKDVHSGLIGPLLVCHTNTLNPAHGRQVTVQEFALFFTIFDETKSWYFTENMERNCRAPCNI |
| | QMEDPTFKENYRFHAINGYIMDTLPGLVMAQDQRIRWYLLSMGSNENIHSIHFSGHVFTVRKK |
| | EEYKMALYNLYPGVFETVEMLPSKAGIWRVECLIGEHLHAGMSTLFLVYSNKCQTPLGMASG |
| | HIRDFQITASGQYGQWAPKLARLHYSGSINAWSTKEPFSWIKVDLLAPMIIHGIKTQGARQKFS |
| | SLYISQFIIMYSLDGKKWQTYRGNSTGTLMVFFGNVDSSGIKHNIFNPPIIARYIRLHPTHYSIRS |
| | TLRMELMGCDLNSCSMPLGMESKAISDAQITASSYFTNMFATWSPSKARLHLQGRSNAWRPQ |
| | VNNPKEWLQVDFQKTMKVTGVTTQGVKSLLTSMYVKEFLISSSQDGHQWTLFFQNGKVKVF |
| | QGNQDSFTPVVNSLDPPLLTRYLRIHPQSWVHQIALRMEVLGCLAQDLYGGSEPATSGSETPGT |
| | SESATPESGPGSEPATSGSETPGSPAGSPTSTEEGTSTEPSEGSAPGSEPATSGSETPGSEPATSGS |
| | ETPGSEPATSGSETPGTSTEPSEGSAPGTSESATPESGPGSEPATSGSETPGTSTEPSEGSAP |
| FVIII | ATRRYYLGAVELSWDYMQSDLGELPVDARFPPRVPKSFPFNTSVVYKKTLFVEFTVHLFNIAK |
| BDD-2- | PRPPWMGLLGPTIQAEVYDTVVITLKNMASHPVSLHAVGVSYWKASEGAEYDDQTSQREKED |
| AE144 | DKVFPGGSHTYVWQVLKENGPMASDPLCLTYSYLSHVDLVKDLNSGLIGALLVCREGSLAKE |
| | KTQTLHKFILLFAVFDEGKSWHSETKNSLMQDRDAASARAWPKMHTVNGYVNRSLPGLIGCH |
| | RKSVYWHVIGMGTTPEVHSIFLEGHTFLVRNHRQASLEISPITFLTAQTLLMDLGQFLLFCHISS |
| | HQHDGMEAYVKVDSCPEEPQLRMKNNEEAEDYDDDLTDSEMDVVRFDDDNSPSFIQIRSVAK |
| | KHPKTWVHYIAALEEDWDYAPLVLAPDDRSYKSQYLNNGPQRIGRKYKKVRFMAYTDETFK |
| | TREAIQHESGILGPLLYGEVGDTLLIIFKNQASRPYNIYPHGITDVRPLYSRRLPKGVKHLKDFPI |
| | LPGEIFKYKWTVTVEDGPTKSDPRCLTRYYSSFVNMERDLASGLIGPLLICYKESVDQRGNQIM |
| | SDKRNVILFSVFDENRSWYLTENIQRFLPNPAGVQLEDPEFQASNIMHSINGYVFDSLQLSVCL |
| | HEVAYWYILSIGAQTDFLSVFFSGYTFKHKMVYEDTLTLFPFSGETVFMSMENPGLWILGCHN |
| | SDFRNRGMTALLKVSSCDKNTGDYYEDSYEDISAYLLSKNNAIEPRSFSQNPPVLKRHQREITR |
| | TTLQSDQEEIDYDDTISVEMKKEDFDIYDEDENQSPRSFQKKTRHYFIAAVERLWDYGMSSSPH |
| | VLRNRAQSGSVPQFKKVVFQEFTDGSFTQPLYRGELNEHLGLLGPYIRAEVEDNIMVTFRNQA |
| | SRPYSFYSSLISYEEDQRQGAEPRKNFVKPNETKTYFWKVQHHMAPTKDEFDCKAWAYFSDV |
| | DLEKDVHSGLIGPLLVCHTNTLNPAHGRQVTVQEFALFFTIFDETKSWYFTENMERNCRAPCNI |
| | QMEDPTFKENYRFHAINGYIMDTLPGLVMAQDQRIRWYLLSMGSNENIHSIHFSGHVFTVRKK |
| | EEYKMALYNLYPGVFETVEMLPSKAGIWRVECLIGEHLHAGMSTLFLVYSNKCQTPLGMASG |
| | HIRDFQITASGQYGQWAPKLARLHYSGSINAWSTKEPFSWIKVDLLAPMIIHGIKTQGARQKFS |
| | SLYISQFIIMYSLDGKKWQTYRGNSTGTLMVFFGNVDSSGIKHNIFNPPIIARYIRLHPTHYSIRS |
| | TLRMELMGCDLNSCSMPLGMESKAISDAQITASSYFTNMFATWSPSKARLHLQGRSNAWRPQ |
| | VNNPKEWLQVDFQKTMKVTGVTTQGVKSLLTSMYVKEFLISSSQDGHQWTLFFQNGKVKVF |
| | QGNQDSFTPVVNSLDPPLLTRYLRIHPQSWVHQIALRMEVLGCEAQDLYGGSEPATSGSETPGT |
| | SESATPESGPGSEPATSGSETPGSPAGSPTSTEEGTSTEPSEGSAPGSEPATSGSETPGSEPATSGS |
| | ETPGSEPATSGSETPGTSTEPSEGSAPGTSESATPESGPGSEPATSGSETPGTSTEPSEGSAP |
| FVIII | ATRRYYLGAVELSWDYMQSDLGELPVDARFPPRVPKSFPFNTSVVYKKTLFVEFTVHLFNIAK |
| BDD-2- | PRPPWMGLLGPTIQAEVYDTVVITLKNMASHPVSLHAVGVSYWKASEGAEYDDQTSQREKED |
| AG144 | DKVFPGGSHTYVWQVLKENGPMASDPLCLTYSYLSHVDLVKDLNSGLIGALLVCREGSLAKE |
| | KTQTLHKFILLFAVFDEGKSWHSETKNSLMQDRDAASARAWPKMHTVNGYVNRSLPGLIGCH |
| | RKSVYWHVIGMGTTPEVHSIFLEGHTFLVRNHRQASLEISPITFLTAQTLLMDLGQFLLFCHISS |
| | HQHDGMEAYVKVDSCPEEPQLRMKNNEEAEDYDDDLTDSEMDVVRFDDDNSPSFIQIRSVAK |
| | KHPKTWVHYIAAEEEDWDYAPLVLAPDDRSYKSQYLNNGPQRIGRKYKKVRFMAYTDETFK |
| | TREAIQHESGILGPLLYGEVGDTLLIIFKNQASRPYNIYPHGITDVRPLYSRRLPKGVKHLKDFPI |
| | LPGEIFKYKWTVTVEDGPTKSDPRCLTRYYSSFVNMERDLASGLIGPLLICYKESVDQRGNQIM |
| | SDKRNVILFSVFDENRSWYLTENIQRFLPNPAGVQLEDPEFQASNIMHSINGYVFDSLQLSVCL |
| | HEVAYWYILSIGAQTDFLSVFFSGYTFKHKMVYEDTLTLFPFSGETVFMSMENPGLWILGCHN |
| | SDFRNRGMTALLKVSSCDKNTGDYYEDSYEDISAYLLSKNNAIEPRSFSQNPPVLKRHQREITR |
| | TTLQSDQEEIDYDDTISVEMKKEDFDIYDEDENQSPRSFQKKTRHYFIAAVERLWDYGMSSSPH |
| | VLRNRAQSGSVPQFKKVVFQEFTDGSFTQPLYRGELNEHLGLLGPYIRAEVEDNIMVTFRNQA |
| | SRPYSFYSSLISYEEDQRQGAEPRKNFVKPNETKTYFWKVQHHMAPTKDEFDCKAWAYFSDV |
| | DLEKDVHSGLIGPLLVCHTNTLNPAHGRQVTVQEFALFFTIFDETKSWYFTENMERNCRAPCNI |
| | QMEDPTFKENYRFHAINGYIMDTLPGLVMAQDQRIRWYLLSMGSNENIHSIHFSGHVFTVRKK |
| | EEYKMALYNLYPGVFETVEMLPSKAGIWRVECLIGEHLHAGMSTLFLVYSNKCQTPLGMASG |
| | HIRDFQITASGQYGQWAPKLARLHYSGSINAWSTKEPFSWIKVDLLAPMIIHGIKTQGARQKFS |
| | SLYISQFIIMYSLDGKKWQTYRGNSTGTLMVFFGNVDSSGIKHNIFNPPIIARYIRLHPTHYSIRS |
| | TLRMELMGCDLNSCSMPLGMESKAISDAQITASSYFTNMFATWSPSKARLHLQGRSNAWRPQ |
| | VNNPKEWLQVDFQKTMKVTGVTTQGVKSLLTSMYVKEFLISSSQDGHQWTLFFQNGKVKVF |
| | QGNQDSFTPVVNSLDPPLLTRYLRIHPQSWVHQIALRMEVLGCEAQDLYGPGSSPSASTGTGP |
| | GSSPSASTGTGPGTPGSGTASSSPGSSTPSGATGSPGSSPSASTGTGPGASPGTSSTGSPGTPGSG |
| | TASSSPGSSTPSGATGSPGTPGSGTASSSPGASPGTSSTGSPGASPGTSSTGSPGTPGSGTASSS |
| FVIII- | ATRRYYLGAVELSWDYMQSDLGELPVDARFPPRVPKSFPFNTSVVYKKTLFVEFTDHLFNIAK |
| AE288 | PRPPWMGLLGPTIQAEVYDTVVITLKNMASHPVSLHAVGVSYWKASEGAEYDDQTSQREKED |
| | DKVFPGGSHTYVWQVLKENGPMASDPLCLTYSYLSHVDLVKDLNSGLIGALLVCREGSLAKE |
| | KTQTLHKFILLFAVFDEGKSWHSETKNSLMQDRDAASARAWPKMHTVNGYVNRSLPGLIGCH |
| | RKSVYWHVIGMGTTPEVHSIFLEGHTFLVRNHRQASLEISPITFLTAQTLLMDLGQFLLFCHISS |
| | HQHDGMEAYVKVDSCPEEPQLRMKNNEEAEDYDDDLTDSEMDVVRFDDDNSPSFIQIRSVAK |
| | KHPKTWVHYIAAEEEDWDYAPLVLAPDDRSYKSQYLNNGPQRIGRKYKKVRFMAYTDETFK |
| | TREAIQHESGILGPLLYGEVGDTLLIIFKNQASRPYNIYPHGITDVRPLYSRRLPKGVKHLKDFPI |
| | LPGEIFKYKWTVTVEDGPTKSDPRCLTRYYSSFVNMERDLASGLIGPLLICYKESVDQRGNQIM |
| | SDKRNVILFSVFDENRSWYLTENIQRFLPNPAGVQLEDPEFQASNIMHSINGYVFDSLQLSVCL |
| | HEVAYWYILSIGAQTDFLSVFFSGYTFKHKMVYEDTLTLFPFSGETVFMSMENPGLWILGCHN |
| | SDFRNRGMTALLKVSSCDKNTGDYYEDSYEDISAYLLSKNNAIEPRSFSQNSRHPSTRQKQFN |
| | ATTIPENDIEKTDPWFAHRTPMPKIQNVSSSDLLMLLRQSPTPHGLSLSDLQEAKYETFSDDPSP |
| | GAIDSNNSLSEMTHFRPQLHHSGDMVFTPESGLQLRLNEKLGTTAATELKKLDFKVSSTSNNLI |
| | STIPSDNLAAGTDNTSSLGPPSMPVHYDSQLDTTLFGKKSSPLTESGGPLSLSEENNDSKLLESG |
| | LMNSQESSWGKNVSSTESGRLFKGKRAHGPALLTKDNALFKVSISLLKTNKTSNNSATNRKTH |
| | IDGPSLLIENSPSVWQNILESDTEFKKVTPLIHDRMLMDKNATALRLNHMSNKTTSSKNMEMV |
| | QQKKEGPIPPDAQNPDMSFFKMLFLPESARWIQRTHGKNSLNSGQGPSPKQLVSLGPEKSVEG |
| | QNFLSEKNKVVVGKGEFTKDVGLKEMVFPSSRNLFLTNLDNLHENNTHNQEKKIQEEIEKKET |
| | LIQENVVLPQIHTVTGTKNFMKNLFLLSTRQNVEGSYDGAYAPVLQDFRSLNDSTNRTKKHTA |
| | HFSKKGEEENLEGLGNQTKQIVEKYACTTRISPNTSQQNFVTQRSKRALKQFRLPLEETELEKRI |
| | IVDDTSTQWSKNMKHLTPSTLTQIDYNEKEKGAITQSPLSDCLTRSHSIPQANRSPLPIAKVSSFP |
| | SIRPIYLTRVLFQDNSSHLPAASYRKKDSGVQESSHFLQGAKKNNLSLAILTLEMTGDQREVGS |
| | LGTSATNSVTYKKVENTVLPKPDLPKTSGKVELLPKVHIYQKDLFPTETSNGSPGHLDLVEGSL |
| | LQGTEGAIKWNEANRPGKVPFLRVATESSAKTPSKLLDPLAWDNHYGTQIPKEEWKSQEKSPE |
| | KTAFKKKDTILSLNACESNHAIAAINEGQNKPEIEVTWAKQGRTERLCSQNPPVLKRHQREITR |
| | TTLQSDQEEIDYDDTISVEMKKEDFDIYDEDENQSPRSFQKKTRHYFIAAVERLWDYGMSSSPH |
| | VLRNRAQSGSVPQFKKVVFQEFTDGSFTQPLYRGELNEHLGLLGPYIRAEVEDNIMVTFRNQA |
| | SRPYSFYSSLISYEEDQRQGAEPRKNFVKPNETKTYFWKVQHHMAPTKDEFDCKAWAYFSDV |
| | DLEKDVHSGLIGPLLVCHTNTLNPAHGRQVTVQEFALFFTIFDETKSWYFTENMERNCRAPCNI |
| | QMEDPTFKENYRFHAINGYIMDTLPGLVMAQDQRIRWYLLSMGSNENIHSIHFSGHVFTVRKK |
| | EEYKMALYNLYPGVFETVEMLPSKAGIWRVECLIGEHLHAGMSTLFLVYSNKCQTPLGMASG |
| | HIRDFQITASGQYGQWAPKLARLHYSGSINAWSTKEPFSWIKVDLLAPMIIHGIKTQGARQKFS |
| | SLYISQFIIMYSLDGKKWQTYRGNSTGTLMVFFGNVDSSGIKHNIFNPPIIARYIRLHPTHYSIRS |
| | TLRMELMGCDLNSCSMPLGMESKAISDAQITASSYFTNMFATWSPSKARLHLQGRSNAWRPQ |
| | VNNPKEWLQVDFQKTMKVTGVTTQGVKSLLTSMYVKEFLISSSQDGHQWTLFFQNGKVKVF |
| | QGNQDSFTPVVNSLDPPLLTRYLRIHPQSWVHQIALRMEVLGCEAQDLYGGTSESATPESGPGS |
| | EPATSGSETPGTSESATPESGPGSEPATSGSETPGTSESATPESGPGTSTEPSEGSAPGSPAGSPTS |
| | TEEGTSESATPESGPGSEPATSGSETPGTSESATPESGPGSPAGSPTSTEEGSPAGSPTSTEEGTST |
| | EPSEGSAPGTSESATPESGPGTSESATPESGPGTSESATPESGPGSEPATSGSETPGSEPATSGSET |
| | PGSPAGSPTSTEEGTSTEPSEGSAPGTSTEPSEGSAPGSEPATSGSETPGTSESATPESGPGTSTEP |
| | SEGSAP |
| FVIII- | ATRRYYLGAVELSWDYMQSDLGELPVDARFPPRVPKSFPFNTSVVYKKTLFVEFTDHLFNIAK |
| AE576 | PRPPWMGLLGPTIQAEVYDTVVITLKNMASHPVSLHAVGVSYWKASEGAEYDDQTSQREKED |
| | DKVFPGGSHTYVWQVLKENGPMASDPLCLTYSYLSHVDLVKDLNSGLIGALLVCREGSLAKE |
| | KTQTLHKFILLFAVFDEGKSWHSETKNSLMQDRDAASARAWPKMHTVNGYVNRSLPGLIGCH |
| | RKSVYWHVIGMGTTPEVHSIFLEGHTFLVRNHRQASLEISPITFLTAQTLLMDLGQFLLFCHISS |
| | HQHDGMEAYVKVDSCPEEPQLRMKNNEEAEDYDDDLTDSEMDVVRFDDDNSPSFIQIRSVAK |
| | KHPKTWVHYIAAEEEDWDYAPLVLAPDDRSYKSQYLNNGPQRIGRKYKKVRFMAYTDETFK |
| | TREAIQHESGILGPLLYGEVGDTLLIIFKNQASRPYNIYPHGITDVRPLYSRRLPKGVKHLKDFPI |
| | LPGEIFKYKWTVTVEDGPTKSDPRCLTRYYSSFVNMERDLASGLIGPLLICYKESVDQRGNQIM |
| | SDKRNVILFSVFDENRSWYLTENIQRFLPNPAGVQLEDPEFQASNIMHSINGYVFDSLQLSVCL |
| | HEVAYWYILSIGAQTDFLSVFFSGYTFKHKMVYEDTLTLFPFSGETVFMSMENPGLWILGCHN |
| | SDFRNRGMTALLKVSSCDKNTGDYYEDSYEDISAYLLSKNNAIEPRSFSQNSRHPSTRQKQFN |
| | ATTIPENDIEKTDPWFAHRTPMPKIQNVSSSDLLMLLRQSPTPHGLSLSDLQEAKYETFSDDPSP |
| | GAIDSNNSLSEMTHFRPQLHHSGDMVFTPESGLQLRLNEKLGTTAATELKKLDFKVSSTSNNLI |
| | STIPSDNLAAGTDNTSSLGPPSMPVHYDSQLDTTLFGKKSSPLTESGGPLSLSEENNDSKLLESG |
| | LMNSQESSWGKNVSSTESGRLFKGKRAHGPALLTKDNALFKVSISLLKTNKTSNNSATNRKTH |
| | IDGPSLLIENSPSVWQNILESDTEFKKVTPLIHDRMLMDKNATALRLNHMSNKTTSSKNMEMV |
| | QQKKEGPIPPDAQNPDMSFFKMLFLPESARWIQRTHGKNSLNSGQGPSPKQLVSLGPEKSVEG |
| | QNFLSEKNKVVVGKGEFTKDVGLKEMVFPSSRNLFLTNLDNLHENNTHNQEKKIQEEIEKKET |
| | LIQENVVLPQIHTVTGTKNFMKNLFLLSTRQNVEGSYDGAYAPVLQDFRSLNDSTNRTKKHTA |
| | HFSKKGEEENLEGLGNQTKQIVEKYACTTRISPNTSQQNFVTQRSKRALKQFRLPLEETELEKRI |
| | IVDDTSTQWSKNMKHLTPSTLTQIDYNEKEKGAITQSPLSDCLTRSHSIPQANRSPLPIAKVSSFP |
| | SIRPIYLTRVLFQDNSSHLPAASYRKKDSGVQESSHFLQGAKKNNLSLAILTLEMTGDQREVGS |
| | LGTSATNSVTYKKVENTVLPKPDLPKTSGKVELLPKVHIYQKDLFPTETSNGSPGHLDLVEGSL |
| | LQGTEGAIKWNEANRPGKVPFLRVATESSAKTPSKLLDPLAWDNHYGTQIPKEEWKSQEKSPE |
| | KTAFKKKDTILSLNACESNHAIAAINEGQNKPEIEVTWAKQGRTERLCSQNPPVLKRHQREITR |
| | TTLQSDQEEIDYDDTISVEMKKEDFDIYDEDENQSPRSFQKKTRHYFIAAVERLWDYGMSSSPH |
| | VLRNRAQSGSVPQFKKVVFQEFTDGSFTQPLYRGELNEHLGLLGPYIRAEVEDNIMVTFRNQA |
| | SRPYSFYSSLISYEEDQRQGAEPRKNFVKPNETKTYFWKVQHHMAPTKDEFDCKAWAYFSDV |
| | DLEKDVHSGLIGPLLVCHTNTLNPAHGRQVTVQEFALFFTIFDETKSWYFTENMERNCRAPCNI |
| | QMEDPTFKENYRFHAINGYIMDTLPGLVMAQDQRIRWYLLSMGSNENIHSIHFSGHVFTVRKK |
| | EEYKMALYNLYPGVFETVEMLPSKAGIWRVECLIGEHLHAGMSTLFLVYSNKCQTPLGMASG |
| | HIRDFQITASGQYGQWAPKLARLHYSGSINAWSTKEPFSWIKVDLLAPMIIHGIKTQGARQKFS |
| | SLYISQFIIMYSLDGKKWQTYRGNSTGTLMVFFGNVDSSGIKHNIFNPPIIARYIRLHPTHYSIRS |
| | TLRMELMGCDLNSCSMPLGMESKAISDAQITASSYFTNMFATWSPSKARLHLQGRSNAWRPQ |
| | VNNPKEWLQVDFQKTMKVTGVTTQGVKSLLTSMYVKEFLISSSQDGHQWTLFFQNGKVKVF |
| | QGNQDSFTPVVNSLDPPLLTRYLRIHPQSWVHQIALRMEVLGCEAQDLYGGSPAGSPTSTEEGT |
| | SESATPESGPGTSTEPSEGSAPGSPAGSPTSTEEGTSTEPSEGSAPGTSTEPSEGSAPGTSESATPE |
| | SGPGSEPATSGSETPGSEPATSGSETPGSPAGSPTSTEEGTSESATPESGPGTSTEPSEGSAPGTST |
| | EPSEGSAPGSPAGSPTSTEEGTSTEPSEGSAPGTSTEPSEGSAPGTSESATPESGPGTSTEPSEGSA |
| | PGTSESATPESGPGSEPATSGSETPGTSTEPSEGSAPGTSTEPSEGSAPGTSESATPESGPGTSESA |
| | TPESGPGSPAGSPTSTEEGTSESATPESGPGSEPATSGSETPGTSESATPESGPGTSTEPSEGSAPG |
| | TSTEPSEGSAPGTSTEPSEGSAPGTSTEPSEGSAPGTSTEPSEGSAPGTSTEPSEGSAPGSPAGSPT |
| | STEEGTSTEPSEGSAPGTSESATPESGPGSEPATSGSETPGTSESATPESGPGSEPATSGSETPGTS |
| | ESATPESGPGTSTEPSEGSAPGTSESATPESGPGSPAGSPTSTEEGSPAGSPTSTEEGSPAGSPTST |
| | EEGTSESATPESGPGTSTEPSEGSAP |
| FVIII- | ATRRYYLGAVELSWDYMQSDLGELPVDARFPPRVPKSFPFNTSVVYKKTLFVEFTDHLFNIAK |
| AF576 | PRPPWMGLLGPTIQAEVYDTVVITLKNMASHPVSLHAVGVSYWKASEGAEYDDQTSQREKED |
| | DKVFPGGSHTYVWQVLKENGPMASDPLCLTYSYLSHVDLVKDLNSGLIGALLVCREGSLAKE |
| | KTQTLHKFILLFAVFDEGKSWHSETKNSLMQDRDAASARAWPKMHTVNGYVNRSLPGLIGCH |
| | RKSVYWHVIGMGTTPEVHSIFLEGHTFLVRNHRQASLEISPITFLTAQTLLMDLGQFLLFCHISS |
| | HQHDGMEAYVKVDSCPEEPQLRMKNNEEAEDYDDDLTDSEMDVVRFDDDNSPSFIQIRSVAK |
| | KHPKTWVHYIAAEEEDWDYAPLVLAPDDRSYKSQYLNNGPQRIGRKYKKVRFMAYTDETFK |
| | TREAIQHESGILGPLLYGEVGDTLLIIFKNQASRPYNIYPHGITDVRPLYSRRLPKGVKHLKDFPI |
| | LPGEIFKYKWTVTVEDGPTKSDPRCLTRYYSSFVNMERDLASGLIGPLLICYKESVDQRGNQIM |
| | SDKRNVILFSVFDENRSWYLTENIQRFLPNPAGVQLEDPEFQASNIMHSINGYVFDSLQLSVCL |
| | HEVAYWYILSIGAQTDFLSVFFSGYTFKHKMVYEDTLTLFPFSGETVFMSMENPGLWILGCHN |
| | SDFRNRGMTALLKVSSCDKNTGDYYEDSYEDISAYLLSKNNAIEPRSFSQNSRHPSTRQKQFN |
| | ATTIPENDIEKTDPWFAHRTPMPKIQNVSSSDLLMLLRQSPTPHGLSLSDLQEAKYETFSDDPSP |
| | GAIDSNNSLSEMTHFRPQLHHSGDMVFTPESGLQLRLNEKLGTTAATELKKLDFKVSSTSNNLI |
| | STIPSDNLAAGTDNTSSLGPPSMPVHYDSQLDTTLFGKKSSPLTESGGPLSLSEENNDSKLLESG |
| | LMNSQESSWGKNVSSTESGRLFKGKRAHGPALLTKDNALFKVSISLLKTNKTSNNSATNRKTH |
| | IDGPSLLIENSPSVWQNILESDTEFKKVTPLIHDRMLMDKNATALRLNHMSNKTTSSKNMEMV |
| | QQKKEGPIPPDAQNPDMSFFKMLFLPESARWIQRTHGKNSLNSGQGPSPKQLVSLGPEKSVEG |
| | QNFLSEKNKVVVGKGEFTKDVGLKEMVFPSSRNLFLTNLDNLHENNTHNQEKKIQEEIEKKET |
| | LIQENVVLPQIHTVTGTKNFMKNLFLLSTRQNVEGSYDGAYAPVLQDFRSLNDSTNRTKKHTA |
| | HFSKKGEEENLEGLGNQTKQIVEKYACTTRISPNTSQQNFVTQRSKRALKQFRLPLEETELEKRI |
| | IVDDTSTQWSKNMKHLTPSTLTQIDYNEKEKGAITQSPLSDCLTRSHSIPQANRSPLPIAKVSSFP |
| | SIRPIYLTRVLFQDNSSHLPAASYRKKDSGVQESSHFLQGAKKNNLSLAILTLEMTGDQREVGS |
| | LGTSATNSVTYKKVENTVLPKPDLPKTSGKVELLPKVHIYQKDLFPTETSNGSPGHLDLVEGSL |
| | LQGTEGAIKWNEANRPGKVPFLRVATESSAKTPSKLLDPLAWDNHYGTQIPKEEWKSQEKSPE |
| | KTAFKKKDTILSLNACESNHAIAAINEGQNKPEIEVTWAKQGRTERLCSQNPPVLKRHQREITR |
| | TTLQSDQEEIDYDDTISVEMKKEDFDIYDEDENQSPRSFQKKTRHYFIAAVERLWDYGMSSSPH |
| | VLRNRAQSGSVPQFKKVVFQEFTDGSFTQPLYRGELNEHLGLLGPYIRAEVEDNIMVTFRNQA |
| | SRPYSFYSSLISYEEDQRQGAEPRKNFVKPNETKTYFWKVQHHMAPTKDEFDCKAWAYFSDV |
| | DLEKDVHSGLIGPLLVCHTNTLNPAHGRQVTVQEFALFFTIFDETKSWYFTENMERNCRAPCNI |
| | QMEDPTFKENYRFHAINGYIMDTLPGLVMAQDQRIRWYLLSMGSNENIHSIHFSGHVFTVRKK |
| | EEYKMALYNLYPGVFETVEMLPSKAGIWRVECLIGEHLHAGMSTLFLVYSNKCQTPLGMASG |
| | HIRDFQITASGQYGQWAPKLARLHYSGSINAWSTKEPFSWIKVDLLAPMIIHGIKTQGARQKFS |
| | SLYISQFIIMYSLDGKKWQTYRGNSTGTLMVFFGNVDSSGIKHNIFNPPIIARYIRLHPTHYSIRS |
| | TLRMELMGCDLNSCSMPLGMESKAISDAQITASSYFTNMFATWSPSKARLHLQGRSNAWRPQ |
| | VNNPKEWLQVDFQKTMKVTGVTTQGVKSLLTSMYVKEFLISSSQDGHQWTLFFQNGKVKVF |
| | QGNQDSFTPVVNSLDPPLLTRYLRIHPQSWVHQIALRMEVLGCEAQDLYGGSTSSTAESPGPGS |
| | TSSTAESPGPGSTSESPSGTAPGSTSSTAESPGPGSTSSTAESPGPGTSTPESGSASPGSTSESPSGT |
| | APGTSPSGESSTAPGSTSESPSGTAPGSTSESPSGTAPGTSPSGESSTAPGSTSESPSGTAPGSTSES |
| | PSGTAPGTSPSGESSTAPGSTSESPSGTAPGSTSESPSGTAPGSTSESPSGTAPGTSTPESGSASPG |
| | STSESPSGTAPGTSTPESGSASPGSTSSTAESPGPGSTSSTAESPGPGTSTPESGSASPGTSTPESGS |
| | ASPGSTSESPSGTAPGTSTPESGSASPGTSTPESGSASPGSTSESPSGTAPGSTSESPSGTAPGSTSE |
| | SPSGTAPGSTSSTAESPGPGTSTPESGSASPGTSTPESGSASPGSTSESPSGTAPGSTSESPSGTAP |
| | GTSTPESGSASPGSTSESPSGTAPGSTSESPSGTAPGTSTPESGSASPGTSPSGESSTAPGSTSSTAE |
| | SPGPGTSPSGESSTAPGSTSSTAESPGPGTSTPESGSASPGSTSESPSGTAPGSTSSTAESPGPGTST |
| | PESGSASPGTSTPESGSASP |
| FVIII- | ATRRYYLGAVELSWDYMQSDLGELPVDARFPPRVPKSFPFNTSVVYKKTLFVEFTDHLFNIAK |
| AE864 | PRPPWMGLLGPTIQAEVYDTVVITLKNMASHPVSLHAVGVSYWKASEGAEYDDQTSQREKED |
| | DKVFPGGSHTYVWQVLKENGPMASDPLCLTYSYLSHVDLVKDLNSGLIGALLVCREGSLAKE |
| | KTQTLHKFILLFAVFDEGKSWHSETKNSLMQDRDAASARAWPKMHTVNGYVNRSLPGLIGCH |
| | RKSVYWHVIGMGTTPEVHSIFLEGHTFLVRNHRQASLEISPITFLTAQTLLMDLGQFLLFCHISS |
| | HQHDGMEAYVKVDSCPEEPQLRMKNNEEAEDYDDDLTDSEMDVVRFDDDNSPSFIQIRSVAK |
| | KHPKTWVHYIAAEEEDWDYAPLVLAPDDRSYKSQYLNNGPQRIGRKYKKVRFMAYTDETFK |
| | TREAIQHESGILGPLLYGEVGDTLLIIFKNQASRPYNIYPHGITDVRPLYSRRLPKGVKHLKDFPI |
| | LPGEIFKYKWTVTVEDGPTKSDPRCLTRYYSSFVNMERDLASGLIGPLLICYKESVDQRGNQIM |
| | SDKRNVILFSVFDENRSWYLTENIQRFLPNPAGVQLEDPEFQASNIMHSINGYVFDSLQLSVCL |
| | HEVAYWYILSIGAQTDFLSVFFSGYTFKHKMVYEDTLTLFPFSGETVFMSMENPGLWILGCHN |
| | SDFRNRGMTALLKVSSCDKNTGDYYEDSYEDISAYLLSKNNAIEPRSFSQNSRHPSTRQKQFN |
| | ATTIPENDIEKTDPWFAHRTPMPKIQNVSSSDLLMLLRQSPTPHGLSLSDLQEAKYETFSDDPSP |
| | GAIDSNNSLSEMTHFRPQLHHSGDMVFTPESGLQLRLNEKLGTTAATELKKLDFKVSSTSNNLI |
| | STIPSDNLAAGTDNTSSLGPPSMPVHYDSQLDTTLFGKKSSPLTESGGPLSLSEENNDSKLLESG |
| | LMNSQESSWGKNVSSTESGRLFKGKRAHGPALLTKDNALFKVSISLLKTNKTSNNSATNRKTH |
| | IDGPSLLIENSPSVWQNILESDTEFKKVTPLIHDRMLMDKNATALRLNHMSNKTTSSKNMEMV |
| | QQKKEGPIPPDAQNPDMSFFKMLFLPESARWIQRTHGKNSLNSGQGPSPKQLVSLGPEKSVEG |
| | QNFLSEKNKVVVGKGEFTKDVGLKEMVFPSSRNLFLTNLDNLHENNTHNQEKKIQEEIEKKET |
| | LIQENVVLPQIHTVTGTKNFMKNLFLLSTRQNVEGSYDGAYAPVLQDFRSLNDSTNRTKKHTA |
| | HFSKKGEEENLEGLGNQTKQIVEKYACTTRISPNTSQQNFVTQRSKRALKQFRLPLEETELEKRI |
| | IVDDTSTQWSKNMKHLTPSTLTQIDYNEKEKGAITQSPLSDCLTRSHSIPQANRSPLPIAKVSSFP |
| | SIRPIYLTRVLFQDNSSHLPAASYRKKDSGVQESSHFLQGAKKNNLSLAILTLEMTGDQREVGS |
| | LGTSATNSVTYKKVENTVLPKPDLPKTSGKVELLPKVHIYQKDLFPTETSNGSPGHLDLVEGSL |
| | LQGTEGAIKWNEANRPGKVPFLRVATESSAKTPSKLLDPLAWDNHYGTQIPKEEWKSQEKSPE |
| | KTAFKKKDTILSLNACESNHAIAAINEGQNKPEIEVTWAKQGRTERLCSQNPPVLKRHQREITR |
| | TTLQSDQEEIDYDDTISVEMKKEDFDIYDEDENQSPRSFQKKTRHYFIAAVERLWDYGMSSSPH |
| | VLRNRAQSGSVPQFKKVVFQEFTDGSFTQPLYRGELNEHLGLLGPYIRAEVEDNIMVTFRNQA |
| | SRPYSFYSSLISYEEDQRQGAEPRKNFVKPNETKTYFWKVQHHMAPTKDEFDCKAWAYFSDV |
| | DLEKDVHSGLIGPLLVCHTNTLNPAHGRQVTVQEFALFFTIFDETKSWYFTENMERNCRAPCNI |
| | QMEDPTFKENYRFHAINGYIMDTLPGLVMAQDQRIRWYLLSMGSNENIHSIHFSGHVFTVRKK |
| | EEYKMALYNLYPGVFETVEMLPSKAGIWRVECLIGEHLHAGMSTLFLVYSNKCQTPLGMASG |
| | HIRDFQITASGQYGQWAPKLARLHYSGSINAWSTKEPFSWIKVDLLAPMIIHGIKTQGARQKFS |
| | SLYISQFIIMYSLDGKKWQTYRGNSTGTLMVFFGNVDSSGIKHNIFNPPIIARYIRLHPTHYSIRS |
| | TLRMELMGCDLNSCSMPLGMESKAISDAQITASSYFTNMFATWSPSKARLHLQGRSNAWRPQ |
| | VNNPKEWLQVDFQKTMKVTGVTTQGVKSLLTSMYVKEFLISSSQDGHQWTLFFQNGKVKVF |
| | QGNQDSFTPVVNSLDPPLLTRYLRIHPQSWVHQIALRMEVLGCEAQDLYGGSPAGSPTSTEEGT |
| | SESATPESGPGTSTEPSEGSAPGSPAGSPTSTEEGTSTEPSEGSAPGTSTEPSEGSAPGTSESATPE |
| | SGPGSEPATSGSETPGSEPATSGSETPGSPAGSPTSTEEGTSESATPESGPGTSTEPSEGSAPGTST |
| | EPSEGSAPGSPAGSPTSTEEGTSTEPSEGSAPGTSTEPSEGSAPGTSESATPESGPGTSTEPSEGSA |
| | PGTSESATPESGPGSEPATSGSETPGTSTEPSEGSAPGTSTEPSEGSAPGTSESATPESGPGTSESA |
| | TPESGPGSPAGSPTSTEEGTSESATPESGPGSEPATSGSETPGTSESATPESGPGTSTEPSEGSAPG |
| | TSTEPSEGSAPGTSTEPSEGSAPGTSTEPSEGSAPGTSTEPSEGSAPGTSTEPSEGSAPGSPAGSPT |
| | STEEGTSTEPSEGSAPGTSESATPESGPGSEPATSGSETPGTSESATPESGPGSEPATSGSETPGTS |
| | ESATPESGPGTSTEPSEGSAPGTSESATPESGPGSPAGSPTSTEEGSPAGSPTSTEEGSPAGSPTST |
| | EEGTSESATPESGPGTSTEPSEGSAPGTSESATPESGPGSEPATSGSETPGTSESATPESGPGSEPA |
| | TSGSETPGTSESATPESGPGTSTEPSEGSAPGSPAGSPTSTEEGTSESATPESGPGSEPATSGSETP |
| | GTSESATPESGPGSPAGSPTSTEEGSPAGSPTSTEEGTSTEPSEGSAPGTSESATPESGPGTSESAT |
| | PESGPGTSESATPESGPGSEPATSGSETPGSEPATSGSETPGSPAGSPTSTEEGTSTEPSEGSAPGT |
| | STEPSEGSAPGSEPATSGSETPGTSESATPESGPGTSTEPSEGSAP |
| FVIII- | ATRRYYLGAVELSWDYMQSDLGELPVDARFPPRVPKSFPFNTSVVYKKTLFVEFTDHLFNIAK |
| AF864 | PRPPWMGLLGPTIQAEVYDTVVITLKNMASHPVSLHAVGVSYWKASEGAEYDDQTSQREKED |
| | DKVFPGGSHTYVWQVLKENGPMASDPLCLTYSYLSHVDLVKDLNSGLIGALLVCREGSLAKE |
| | KTQTLHKFILLFAVFDEGKSWHSETKNSLMQDRDAASARAWPKMHTVNGYVNRSLPGLIGCH |
| | RKSVYWHVIGMGTTPEVHSIFLEGHTFLVRNHRQASLEISPITFLTAQTLLMDLGQFLLFCHISS |
| | HQHDGMEAYVKVDSCPEEPQLRMKNNEEAEDYDDDLTDSEMDVVRFDDDNSPSFIQIRSVAK |
| | KHPKTWVHYIAAEEEDWDYAPLVLAPDDRSYKSQYLNNGPQRIGRKYKKVRFMAYTDETFK |
| | TREAIQHESGILGPLLYGEVGDTLLIIFKNQASRPYNIYPHGITDVRPLYSRRLPKGVKHLKDFPI |
| | LPGEIFKYKWTVTVEDGPTKSDPRCLTRYYSSFVNMERDLASGLIGPLLICYKESVDQRGNQIM |
| | SDKRNVILFSVFDENRSWYLTENIQRFLPNPAGVQLEDPEFQASNIMHSINGYVFDSLQLSVCL |
| | HEVAYWYILSIGAQTDFLSVFFSGYTFKHKMVYEDTLTLFPFSGETVFMSMENPGLWILGCHN |
| | SDFRNRGMTALLKVSSCDKNTGDYYEDSYEDISAYLLSKNNAIEPRSFSQNSRHPSTRQKQFN |
| | ATTIPENDIEKTDPWFAHRTPMPKIQNVSSSDLLMLLRQSPTPHGLSLSDLQEAKYETFSDDPSP |
| | GAIDSNNSLSEMTHFRPQLHHSGDMVFTPESGLQLRLNEKLGTTAATELKKLDFKVSSTSNNLI |
| | STIPSDNLAAGTDNTSSLGPPSMPVHYDSQLDTTLFGKKSSPLTESGGPLSLSEENNDSKLLESG |
| | LMNSQESSWGKNVSSTESGRLFKGKRAHGPALLTKDNALFKVSISLLKTNKTSNNSATNRKTH |
| | IDGPSLLIENSPSVWQNILESDTEFKKVTPLIHDRMLMDKNATALRLNHMSNKTTSSKNMEMV |
| | QQKKEGPIPPDAQNPDMSFFKMLFLPESARWIQRTHGKNSLNSGQGPSPKQLVSLGPEKSVEG |
| | QNFLSEKNKVVVGKGEFTKDVGLKEMVFPSSRNLFLTNLDNLHENNTHNQEKKIQEEIEKKET |
| | LIQENVVLPQIHTVTGTKNFMKNLFLLSTRQNVEGSYDGAYAPVLQDFRSLNDSTNRTKKHTA |
| | HFSKKGEEENLEGLGNQTKQIVEKYACTTRISPNTSQQNFVTQRSKRALKQFRLPLEETELEKRI |
| | IVDDTSTQWSKNMKHLTPSTLTQIDYNEKEKGAITQSPLSDCLTRSHSIPQANRSPLPIAKVSSFP |
| | SIRPIYLTRVLFQDNSSHLPAASYRKKDSGVQESSHFLQGAKKNNLSLAILTLEMTGDQREVGS |
| | LGTSATNSVTYKKVENTVLPKPDLPKTSGKVELLPKVHIYQKDLFPTETSNGSPGHLDLVEGSL |
| | LQGTEGAIKWNEANRPGKVPFLRVATESSAKTPSKLLDPLAWDNHYGTQIPKEEWKSQEKSPE |
| | KTAFKKKDTILSLNACESNHAIAAINEGQNKPEIEVTWAKQGRTERLCSQNPPVLKRHQREITR |
| | TTLQSDQEEIDYDDTISVEMKKEDFDIYDEDENQSPRSFQKKTRHYFIAAVERLWDYGMSSSPH |
| | VLRNRAQSGSVPQFKKVVFQEFTDGSFTQPLYRGELNEHLGLLGPYIRAEVEDNIMVTFRNQA |
| | SRPYSFYSSLISYEEDQRQGAEPRKNFVKPNETKTYFWKVQHHMAPTKDEFDCKAWAYFSDV |
| | DLEKDVHSGLIGPLLVCHTNTLNPAHGRQVTVQEFALFFTIFDETKSWYFTENMERNCRAPCNI |
| | QMEDPTFKENYRFHAINGYIMDTLPGLVMAQDQRIRWYLLSMGSNENIHSIHFSGHVFTVRKK |
| | EEYKMALYNLYPGVFETVEMLPSKAGIWRVECLIGEHLHAGMSTLFLVYSNKCQTPLGMASG |
| | HIRDFQITASGQYGQWAPKLARLHYSGSINAWSTKEPFSWIKVDLLAPMIIHGIKTQGARQKFS |
| | SLYISQFIIMYSLDGKKWQTYRGNSTGTLMVFFGNVDSSGIKHNIFNPPIIARYIRLHPTHYSIRS |
| | TLRMELMGCDLNSCSMPLGMESKAISDAQITASSYFTNMFATWSPSKARLHLQGRSNAWRPQ |
| | VNNPKEWLQVDFQKTMKVTGVTTQGVKSLLTSMYVKEFLISSSQDGHQWTLFFQNGKVKVF |
| | QGNQDSFTPVVNSLDPPLLTRYLRIHPQSWVHQIALRMEVLGCEAQDLYGGSTSESPSGTAPGT |
| | SPSGESSTAPGSTSESPSGTAPGSTSESPSGTAPGTSTPESGSASPGTSTPESGSASPGSTSESPSGT |
| | APGSTSESPSGTAPGTSPSGESSTAPGSTSESPSGTAPGTSPSGESSTAPGTSPSGESSTAPGSTSST |
| | AESPGPGTSPSGESSTAPGTSPSGESSTAPGSTSSTAESPGPGTSTPESGSASPGTSTPESGSASPG |
| | STSESPSGTAPGSTSESPSGTAPGTSTPESGSASPGSTSSTAESPGPGTSTPESGSASPGSTSESPSG |
| | TAPGTSPSGESSTAPGSTSSTAESPGPGTSPSGESSTAPGTSTPESGSASPGSTSSTAESPGPGSTSS |
| | TAESPGPGSTSSTAESPGPGSTSSTAESPGPGTSPSGESSTAPGSTSESPSGTAPGSTSESPSGTAP |
| | GTSTPESGPXXXGASASGAPSTXXXXSESPSGTAPGSTSESPSGTAPGSTSESPSGTAPGSTSESP |
| | SGTAPGSTSESPSGTAPGSTSESPSGTAPGTSTPESGSASPGTSPSGESSTAPGTSPSGESSTAPGS |
| | TSSTAESPGPGTSPSGESSTAPGTSTPESGSASPGSTSESPSGTAPGSTSESPSGTAPGTSPSGESST |
| | APGSTSESPSGTAPGTSTPESGSASPGTSTPESGSASPGSTSESPSGTAPGTSTPESGSASPGSTSST |
| | AESPGPGSTSESPSGTAPGSTSESPSGTAPGTSPSGESSTAPGSTSSTAESPGPGTSPSGESSTAPG |
| | TSTPESGSASPGTSPSGESSTAPGTSPSGESSTAPGTSPSGESSTAPGSTSSTAESPGPGSTSSTAES |
| | PGPGTSPSGESSTAPGSSPSASTGTGPGSSTPSGATGSPGSSTPSGATGSP |
| FVIII- | ATRRYYLGAVELSWDYMQSDLGELPVDARFPPRVPKSFPFNTSVVYKKTLFVEFTDHLFNIAK |
| AG864 | PRPPWMGLLGPTIQAEVYDTVVITLKNMASHPVSLHAVGVSYWKASEGAEYDDQTSQREKED |
| | DKVFPGGSHTYVWQVLKENGPMASDPLCLTYSYLSHVDLVKDLNSGLIGALLVCREGSLAKE |
| | KTQTLHKFILLFAVFDEGKSWHSETKNSLMQDRDAASARAWPKMHTVNGYVNRSLPGLIGCH |
| | RKSVYWHVIGMGTTPEVHSIFLEGHTFLVRNHRQASLEISPITFLTAQTLLMDLGQFLLFCHISS |
| | HQHDGMEAYVKVDSCPEEPQLRMKNNEEAEDYDDDLTDSEMDVVRFDDDNSPSFIQIRSVAK |
| | KHPKTWVHYIAAEEEDWDYAPLVLAPDDRSYKSQYLNNGPQRIGRKYKKVRFMAYTDETFK |
| | TREAIQHESGILGPLLYGEVGDTLLIIFKNQASRPYNIYPHGITDVRPLYSRRLPKGVKHLKDFPI |
| | LPGEIFKYKWTVTVEDGPTKSDPRCLTRYYSSFVNMERDLASGLIGPLLICYKESVDQRGNQIM |
| | SDKRNVILFSVFDENRSWYLTENIQRFLPNPAGVQLEDPEFQASNIMHSINGYVFDSLQLSVCL |
| | HEVAYWYILSIGAQTDFLSVFFSGYTFKHKMVYEDTLTLFPFSGETVFMSMENPGLWILGCHN |
| | SDFRNRGMTALLKVSSCDKNTGDYYEDSYEDISAYLLSKNNAIEPRSFSQNSRHPSTRQKQFN |
| | ATTIPENDIEKTDPWFAHRTPMPKIQNVSSSDLLMLLRQSPTPHGLSLSDLQEAKYETFSDDPSP |
| | GAIDSNNSLSEMTHFRPQLHHSGDMVFTPESGLQLRLNEKLGTTAATELKKLDFKVSSTSNNLI |
| | STIPSDNLAAGTDNTSSLGPPSMPVHYDSQLDTTLFGKKSSPLTESGGPLSLSEENNDSKLLESG |
| | LMNSQESSWGKNVSSTESGRLFKGKRAHGPALLTKDNALFKVSISLLKTNKTSNNSATNRKTH |
| | IDGPSLLIENSPSVWQNILESDTEFKKVTPLIHDRMLMDKNATALRLNHMSNKTTSSKNMEMV |
| | QQKKEGPIPPDAQNPDMSFFKMLFLPESARWIQRTHGKNSLNSGQGPSPKQLVSLGPEKSVEG |
| | QNFLSEKNKVVVGKGEFTKDVGLKEMVFPSSRNLFLTNLDNLHENNTHNQEKKIQEEIEKKET |
| | LIQENVVLPQIHTVTGTKNFMKNLFLLSTRQNVEGSYDGAYAPVLQDFRSLNDSTNRTKKHTA |
| | HFSKKGEEENLEGLGNQTKQIVEKYACTTRISPNTSQQNFVTQRSKRALKQFRLPLEETELEKRI |
| | IVDDTSTQWSKNMKHLTPSTLTQIDYNEKEKGAITQSPLSDCLTRSHSIPQANRSPLPIAKVSSFP |
| | SIRPIYLTRVLFQDNSSHLPAASYRKKDSGVQESSHFLQGAKKNNLSLAILTLEMTGDQREVGS |
| | LGTSATNSVTYKKVENTVLPKPDLPKTSGKVELLPKVHIYQKDLFPTETSNGSPGHLDLVEGSL |
| | LQGTEGAIKWNEANRPGKVPFLRVATESSAKTPSKLLDPLAWDNHYGTQIPKEEWKSQEKSPE |
| | KTAFKKKDTILSLNACESNHAIAAINEGQNKPEIEVTWAKQGRTERLCSQNPPVLKRHQREITR |
| | TTLQSDQEEIDYDDTISVEMKKEDFDIYDEDENQSPRSFQKKTRHYFIAAVERLWDYGMSSSPH |
| | VLRNRAQSGSVPQFKKVVFQEFTDGSFTQPLYRGELNEHLGLLGPYIRAEVEDNIMVTFRNQA |
| | SRPYSFYSSLISYEEDQRQGAEPRKNFVKPNETKTYFWKVQHHMAPTKDEFDCKAWAYFSDV |
| | DLEKDVHSGLIGPLLVCHTNTLNPAHGRQVTVQEFALFFTIFDETKSWYFTENMERNCRAPCNI |
| | QMEDPTFKENYRFHAINGYIMDTLPGLVMAQDQRIRWYLLSMGSNENIHSIHFSGHVFTVRKK |
| | EEYKMALYNLYPGVFETVEMLPSKAGIWRVECLIGEHLHAGMSTLFLVYSNKCQTPLGMASG |
| | HIRDFQITASGQYGQWAPKLARLHYSGSINAWSTKEPFSWIKVDLLAPMIIHGIKTQGARQKFS |
| | SLYISQFIIMYSLDGKKWQTYRGNSTGTLMVFFGNVDSSGIKHNIFNPPIIARYIRLHPTHYSIRS |
| | TLRMELMGCDLNSCSMPLGMESKAISDAQITASSYFTNMFATWSPSKARLHLQGRSNAWRPQ |
| | VNNPKEWLQVDFQKTMKVTGVTTQGVKSLLTSMYVKEFLISSSQDGHQWTLFFQNGKVKVF |
| | QGNQDSFTPVVNSLDPPLLTRYLRIHPQSWVHQIALRMEVLGCEAQDLYGGASPGTSSTGSPG |
| | SSPSASTGTGPGSSPSASTGTGPGTPGSGTASSSPGSSTPSGATGSPGSNPSASTGTGPGASPGTS |
| | STGSPGTPGSGTASSSPGSSTPSGATGSPGTPGSGTASSSPGASPGTSSTGSPGASPGTSSTGSPGT |
| | PGSGTASSSPGSSTPSGATGSPGASPGTSSTGSPGTPGSGTASSSPGSSTPSGATGSPGSNPSASTG |
| | TGPGSSPSASTGTGPGSSTPSGATGSPGSSTPSGATGSPGASPGTSSTGSPGASPGTSSTGSPGAS |
| | PGTSSTGSPGTPGSGTASSSPGASPGTSSTGSPGASPGTSSTGSPGASPGTSSTGSPGSSPSASTGT |
| | GPGTPGSGTASSSPGASPGTSSTGSPGASPGTSSTGSPGASPGTSSTGSPGSSTPSGATGSPGSSTP |
| | SGATGSPGASPGTSSTGSPGTPGSGTASSSPGSSTPSGATGSPGSSTPSGATGSPGSSTPSGATGS |
| | PGSSPSASTGTGPGASPGTSSTGSPGASPGTSSTGSPGTPGSGTASSSPGASPGTSSTGSPGASPG |
| | TSSTGSPGASPGTSSTGSPGASPGTSSTGSPGTPGSGTASSSPGSSTPSGATGSPGTPGSGTASSSP |
| | GSSTPSGATGSPGTPGSGTASSSPGSSTPSGATGSPGSSTPSGATGSPGSSPSASTGTGPGSSPSAS |
| | TGTGPGASPGTSSTGSPGTPGSGTASSSPGSSTPSGATGSPGSSPSASTGTGPGSSPSASTGTGPG |
| | ASPGTSSTGSPGASPGTSSTGSPGSSTPSGATGSPGSSPSASTGTGPGASPGTSSTGSPGSSPSAST |
| | GTGPGTPGSGTASSSPGSSTPSGATGSPGSSTPSGATGSPGASPGTSSTGSP |
| FVIII | ATRRYYLGAVELSWDYMQSDLGELPVDARFPPRVPKSFPFNTSVVYKKTLFVEFTVHLFNIAK |
| BDD2- | PRPPWMGLLGPTIQAEVYDTVVITLKNMASHPVSLHAVGVSYWKASEGAEYDDQTSQREKED |
| AE864 | DKVFPGGSHTYVWQVLKENGPMASDPLCLTYSYLSHVDLVKDLNSGLIGALLVCREGSLAKE |
| | KTQTLHKFILLFAVFDEGKSWHSETKNSLMQDRDAASARAWPKMHTVNGYVNRSLPGLIGCH |
| | RKSVYWHVIGMGTTPEVHSIFLEGHTFLVRNHRQASLEISPITFLTAQTLLMDLGQFLLFCHISS |
| | HQHDGMEAYVKVDSCPEEPQLRMKNNEEAEDYDDDLTDSEMDVVRFDDDNSPSFIQIRSVAK |
| | KHPKTWVHYIAAEEEDWDYAPLVLAPDDRSYKSQYLNNGPQRIGRKYKKVRFMAYTDETFK |
| | TREAIQHESGILGPLLYGEVGDTLLIIFKNQASRPYNIYPHGITDVRPLYSRRLPKGVKHLKDFPI |
| | LPGEIFKYKWTVTVEDGPTKSDPRCLTRYYSSFVNMERDLASGLIGPLLICYKESVDQRGNQIM |
| | SDKRNVILFSVFDENRSWYLTENIQRFLPNPAGVQLEDPEFQASNIMHSINGYVFDSLQLSVCL |
| | HEVAYWYILSIGAQTDFLSVFFSGYTFKHKMVYEDTLTLFPFSGETVFMSMENPGLWILGCHN |
| | SDFRNRGMTALLKVSSCDKNTGDYYEDSYEDISAYLLSKNNAIEPRSFSQNPPVLKRHQREITR |
| | TTLQSDQEEIDYDDTISVEMKKEDFDIYDEDENQSPRSFQKKTRHYFIAAVERLWDYGMSSSPH |
| | VLRNRAQSGSVPQFKKVVFQEFTDGSFTQPLYRGELNEHLGLLGPYIRAEVEDNIMVTFRNQA |
| | SRPYSFYSSLISYEEDQRQGAEPRKNFVKPNETKTYFWKVQHHMAPTKDEFDCKAWAYFSDV |
| | DLEKDVHSGLIGPLLVCHTNTLNPAHGRQVTVQEFALFFTIFDETKSWYFTENMERNCRAPCNI |
| | QMEDPTFKENYRFHAINGYIMDTLPGLVMAQDQRIRWYLLSMGSNENIHSIHFSGHVFTVRKK |
| | EEYKMALYNLYPGVFETVEMLPSKAGIWRVECLIGEHLHAGMSTLFLVYSNKCQTPLGMASG |
| | HIRDFQITASGQYGQWAPKLARLHYSGSINAWSTKEPFSWIKVDLLAPMIIHGIKTQGARQKFS |
| | SLYISQFIIMYSLDGKKWQTYRGNSTGTLMVFFGNVDSSGIKHNIFNPPIIARYIRLHPTHYSIRS |
| | TLRMELMGCDLNSCSMPLGMESKAISDAQITASSYFTNMFATWSPSKARLHLQGRSNAWRPQ |
| | VNNPKEWLQVDFQKTMKVTGVTTQGVKSLLTSMYVKEFLISSSQDGHQWTLFFQNGKVKVF |
| | QGNQDSFTPVVNSLDPPLLTRYLRIHPQSWVHQIALRMEVLGCEAQDLYGGSPAGSPTSTEEGT |
| | SESATPESGPGTSTEPSEGSAPGSPAGSPTSTEEGTSTEPSEGSAPGTSTEPSEGSAPGTSESATPE |
| | SGPGSEPATSGSETPGSEPATSGSETPGSPAGSPTSTEEGTSESATPESGPGTSTEPSEGSAPGTST |
| | EPSEGSAPGSPAGSPTSTEEGTSTEPSEGSAPGTSTEPSEGSAPGTSESATPESGPGTSTEPSEGSA |
| | PGTSESATPESGPGSEPATSGSETPGTSTEPSEGSAPGTSTEPSEGSAPGTSESATPESGPGTSESA |
| | TPESGPGSPAGSPTSTEEGTSESATPESGPGSEPATSGSETPGTSESATPESGPGTSTEPSEGSAPG |
| | TSTEPSEGSAPGTSTEPSEGSAPGTSTEPSEGSAPGTSTEPSEGSAPGTSTEPSEGSAPGSPAGSPT |
| | STEEGTSTEPSEGSAPGTSESATPESGPGSEPATSGSETPGTSESATPESGPGSEPATSGSETPGTS |
| | ESATPESGPGTSTEPSEGSAPGTSESATPESGPGSPAGSPTSTEEGSPAGSPTSTEEGSPAGSPTST |
| | EEGTSESATPESGPGTSTEPSEGSAPGTSESATPESGPGSEPATSGSETPGTSESATPESGPGSEPA |
| | TSGSETPGTSESATPESGPGTSTEPSEGSAPGSPAGSPTSTEEGTSESATPESGPGSEPATSGSETP |
| | GTSESATPESGPGSPAGSPTSTEEGSPAGSPTSTEEGTSTEPSEGSAPGTSESATPESGPGTSESAT |
| | PESGPGTSESATPESGPGSEPATSGSETPGSEPATSGSETPGSPAGSPTSTEEGTSTEPSEGSAPGT |
| | STEPSEGSAPGSEPATSGSETPGTSESATPESGPGTSTEPSEGSAP |
| FVIII | ATRRYYLGAVELSWDYMQSDLGELPVDARFPPRVPKSFPFNTSVVYKKTLFVEFTVHLFNIAK |
| BDD2- | PRPPWMGLLGPTIQAEVYDTVVITLKNMASHPVSLHAVGVSYWKASEGAEYDDQTSQREKED |
| AG864 | DKVFPGGSHTYVWQVLKENGPMASDPLCLTYSYLSHVDLVKDLNSGLIGALLVCREGSLAKE |
| | KTQTLHKFILLFAVFDEGKSWHSETKNSLMQDRDAASARAWPKMHTVNGYVNRSLPGLIGCH |
| | RKSVYWHVIGMGTTPEVHSIFLEGHTFLVRNHRQASLEISPITFLTAQTLLMDLGQFLLFCHISS |
| | HQHDGMEAYVKVDSCPEEPQLRMKNNEEAEDYDDDLTDSEMDVVRFDDDNSPSFIQIRSVAK |
| | KHPKTWVHYIAAEEEDWDYAPLVLAPDDRSYKSQYLNNGPQRIGRKYKKVRFMAYTDETFK |
| | TREAIQHESGILGPLLYGEVGDTLLIIFKNQASRPYNIYPHGITDVRPLYSRRLPKGVKHLKDFPI |
| | LPGEIFKYKWTVTVEDGPTKSDPRCLTRYYSSFVNMERDLASGLIGPLLICYKESVDQRGNQIM |
| | SDKRNVILFSVFDENRSWYLTENIQRFLPNPAGVQLEDPEFQASNIMHSINGYVFDSLQLSVCL |
| | HEVAYWYILSIGAQTDFLSVFFSGYTFKHKMVYEDTLTLFPFSGETVFMSMENPGLWILGCHN |
| | SDFRNRGMTALLKVSSCDKNTGDYYEDSYEDISAYLLSKNNAIEPRSFSQNPPVLKRHQREITR |
| | TTLQSDQEEIDYDDTISVEMKKEDFDIYDEDENQSPRSFQKKTRHYFIAAVERLWDYGMSSSPH |
| | VLRNRAQSGSVPQFKKVVFQEFTDGSFTQPLYRGELNEHLGLLGPYIRAEVEDNIMVTFRNQA |
| | SRPYSFYSSLISYEEDQRQGAEPRKNFVKPNETKTYFWKVQHHMAPTKDEFDCKAWAYFSDV |
| | DLEKDVHSGLIGPLLVCHTNTLNPAHGRQVTVQEFALFFTIFDETKSWYFTENMERNCRAPCNI |
| | QMEDPTFKENYRFHAINGYIMDTLPGLVMAQDQRIRWYLLSMGSNENIHSIHFSGHVFTVRKK |
| | EEYKMALYNLYPGVFETVEMLPSKAGIWRVECLIGEHLHAGMSTLFLVYSNKCQTPLGMASG |
| | HIRDFQITASGQYGQWAPKLARLHYSGSINAWSTKEPFSWIKVDLLAPMIIHGIKTQGARQKFS |
| | SLYISQFIIMYSLDGKKWQTYRGNSTGTLMVFFGNVDSSGIKHNIFNPPIIARYIRLHPTHYSIRS |
| | TLRMELMGCDLNSCSMPLGMESKAISDAQITASSYFTNMFATWSPSKARLHLQGRSNAWRPQ |
| | VNNPKEWLQVDFQKTMKVTGVTTQGVKSLLTSMYVKEFLISSSQDGHQWTLFFQNGKVKVF |
| | QGNQDSFTPVVNSLDPPLLTRYLRIHPQSWVHQIALRMEVLGCEAQDLYGGASPGTSSTGSPG |
| | SSPSASTGTGPGSSPSASTGTGPGTPGSGTASSSPGSSTPSGATGSPGSNPSASTGTGPGASPGTS |
| | STGSPGTPGSGTASSSPGSSTPSGATGSPGTPGSGTASSSPGASPGTSSTGSPGASPGTSSTGSPGT |
| | PGSGTASSSPGSSTPSGATGSPGASPGTSSTGSPGTPGSGTASSSPGSSTPSGATGSPGSNPSASTG |
| | TGPGSSPSASTGTGPGSSTPSGATGSPGSSTPSGATGSPGASPGTSSTGSPGASPGTSSTGSPGAS |
| | PGTSSTGSPGTPGSGTASSSPGASPGTSSTGSPGASPGTSSTGSPGASPGTSSTGSPGSSPSASTGT |
| | GPGTPGSGTASSSPGASPGTSSTGSPGASPGTSSTGSPGASPGTSSTGSPGSSTPSGATGSPGSSTP |
| | SGATGSPGASPGTSSTGSPGTPGSGTASSSPGSSTPSGATGSPGSSTPSGATGSPGSSTPSGATGS |
| | PGSSPSASTGTGPGASPGTSSTGSPGASPGTSSTGSPGTPGSGTASSSPGASPGTSSTGSPGASPG |
| | TSSTGSPGASPGTSSTGSPGASPGTSSTGSPGTPGSGTASSSPGSSTPSGATGSPGTPGSGTASSSP |
| | GSSTPSGATGSPGTPGSGTASSSPGSSTPSGATGSPGSSTPSGATGSPGSSPSASTGTGPGSSPSAS |
| | TGTGPGASPGTSSTGSPGTPGSGTASSSPGSSTPSGATGSPGSSPSASTGTGPGSSPSASTGTGPG |
| | ASPGTSSTGSPGASPGTSSTGSPGSSTPSGATGSPGSSPSASTGTGPGASPGTSSTGSPGSSPSAST |
| | GTGPGTPGSGTASSSPGSSTPSGATGSPGSSTPSGATGSPGASPGTSSTGSP |
| FVIII- | ATRRYYLGAVELSWDYMQSDLGELPVDARFPPRVPKSFPFNTSVVYKKTLFVEFTDHLFNIAK |
| AM875 | PRPPWMGLLGPTIQAEVYDTVVITLKNMASHPVSLHAVGVSYWKASEGAEYDDQTSQREKED |
| | DKVFPGGSHTYVWQVLKENGPMASDPLCLTYSYLSHVDLVKDLNSGLIGALLVCREGSLAKE |
| | KTQTLHKFILLFAVFDEGKSWHSETKNSLMQDRDAASARAWPKMHTVNGYVNRSLPGLIGCH |
| | RKSVYWHVIGMGTTPEVHSIFLEGHTFLVRNHRQASLEISPITFLTAQTLLMDLGQFLLFCHISS |
| | HQHDGMEAYVKVDSCPEEPQLRMKNNEEAEDYDDDLTDSEMDVVRFDDDNSPSFIQIRSVAK |
| | KHPKTWVHYIAAEEEDWDYAPLVLAPDDRSYKSQYLNNGPQRIGRKYKKVRFMAYTDETFK |
| | TREAIQHESGILGPLLYGEVGDTLLIIFKNQASRPYNIYPHGITDVRPLYSRRLPKGVKHLKDFPI |
| | LPGEIFKYKWTVTVEDGPTKSDPRCLTRYYSSFVNMERDLASGLIGPLLICYKESVDQRGNQIM |
| | SDKRNVILFSVFDENRSWYLTENIQRFLPNPAGVQLEDPEFQASNIMHSINGYVFDSLQLSVCL |
| | HEVAYWYILSIGAQTDFLSVFFSGYTFKHKMVYEDTLTLFPFSGETVFMSMENPGLWILGCHN |
| | SDFRNRGMTALLKVSSCDKNTGDYYEDSYEDISAYLLSKNNAIEPRSFSQNSRHPSTRQKQFN |
| | ATTIPENDIEKTDPWFAHRTPMPKIQNVSSSDLLMLLRQSPTPHGLSLSDLQEAKYETFSDDPSP |
| | GAIDSNNSLSEMTHFRPQLHHSGDMVFTPESGLQLRLNEKLGTTAATELKKLDFKVSSTSNNLI |
| | STIPSDNLAAGTDNTSSLGPPSMPVHYDSQLDTTLFGKKSSPLTESGGPLSLSEENNDSKLLESG |
| | LMNSQESSWGKNVSSTESGRLFKGKRAHGPALLTKDNALFKVSISLLKTNKTSNNSATNRKTH |
| | IDGPSLLIENSPSVWQNILESDTEFKKVTPLIHDRMLMDKNATALRLNHMSNKTTSSKNMEMV |
| | QQKKEGPIPPDAQNPDMSFFKMLFLPESARWIQRTHGKNSLNSGQGPSPKQLVSLGPEKSVEG |
| | QNFLSEKNKVVVGKGEFTKDVGLKEMVFPSSRNLFLTNLDNLHENNTHNQEKKIQEEIEKKET |
| | LIQENVVLPQIHTVTGTKNFMKNLFLLSTRQNVEGSYDGAYAPVLQDFRSLNDSTNRTKKHTA |
| | HFSKKGEEENLEGLGNQTKQIVEKYACTTRISPNTSQQNFVTQRSKRALKQFRLPLEETELEKRI |
| | IVDDTSTQWSKNMKHLTPSTLTQIDYNEKEKGAITQSPLSDCLTRSHSIPQANRSPLPIAKVSSFP |
| | SIRPIYLTRVLFQDNSSHLPAASYRKKDSGVQESSHFLQGAKKNNLSLAILTLEMTGDQREVGS |
| | LGTSATNSVTYKKVENTVLPKPDLPKTSGKVELLPKVHIYQKDLFPTETSNGSPGHLDLVEGSL |
| | LQGTEGAIKWNEANRPGKVPFLRVATESSAKTPSKLLDPLAWDNHYGTQIPKEEWKSQEKSPE |
| | KTAFKKKDTILSLNACESNHAIAAINEGQNKPEIEVTWAKQGRTERLCSQNPPVLKRHQREITR |
| | TTLQSDQEEIDYDDTISVEMKKEDFDIYDEDENQSPRSFQKKTRHYFIAAVERLWDYGMSSSPH |
| | VLRNRAQSGSVPQFKKVVFQEFTDGSFTQPLYRGELNEHLGLLGPYIRAEVEDNIMVTFRNQA |
| | SRPYSFYSSLISYEEDQRQGAEPRKNFVKPNETKTYFWKVQHHMAPTKDEFDCKAWAYFSDV |
| | DLEKDVHSGLIGPLLVCHTNTLNPAHGRQVTVQEFALFFTIFDETKSWYFTENMERNCRAPCNI |
| | QMEDPTFKENYRFHAINGYIMDTLPGLVMAQDQRIRWYLLSMGSNENIHSIHFSGHVFTVRKK |
| | EEYKMALYNLYPGVFETVEMLPSKAGIWRVECLIGEHLHAGMSTLFLVYSNKCQTPLGMASG |
| | HIRDFQITASGQYGQWAPKLARLHYSGSINAWSTKEPFSWIKVDLLAPMIIHGIKTQGARQKFS |
| | SLYISQFIIMYSLDGKKWQTYRGNSTGTLMVFFGNVDSSGIKHNIFNPPIIARYIRLHPTHYSIRS |
| | TLRMELMGCDLNSCSMPLGMESKAISDAQITASSYFTNMFATWSPSKARLHLQGRSNAWRPQ |
| | VNNPKEWLQVDFQKTMKVTGVTTQGVKSLLTSMYVKEFLISSSQDGHQWTLFFQNGKVKVF |
| | QGNQDSFTPVVNSLDPPLLTRYLRIHPQSWVHQIALRMEVLGCEAQDLYGGTSTEPSEGSAPGS |
| | EPATSGSETPGSPAGSPTSTEEGSTSSTAESPGPGTSTPESGSASPGSTSESPSGTAPGSTSESPSGT |
| | APGTSTPESGSASPGTSTPESGSASPGSEPATSGSETPGTSESATPESGPGSPAGSPTSTEEGTSTE |
| | PSEGSAPGTSESATPESGPGTSTEPSEGSAPGTSTEPSEGSAPGSPAGSPTSTEEGTSTEPSEGSAP |
| | GTSTEPSEGSAPGTSESATPESGPGTSESATPESGPGTSTEPSEGSAPGTSTEPSEGSAPGTSESAT |
| | PESGPGTSTEPSEGSAPGSEPATSGSETPGSPAGSPTSTEEGSSTPSGATGSPGTPGSGTASSSPGS |
| | STPSGATGSPGTSTEPSEGSAPGTSTEPSEGSAPGSEPATSGSETPGSPAGSPTSTEEGSPAGSPTS |
| | TEEGTSTEPSEGSAPGASASGAPSTGGTSESATPESGPGSPAGSPTSTEEGSPAGSPTSTEEGSTSS |
| | TAESPGPGSTSESPSGTAPGTSPSGESSTAPGTPGSGTASSSPGSSTPSGATGSPGSSPSASTGTGP |
| | GSEPATSGSETPGTSESATPESGPGSEPATSGSETPGSTSSTAESPGPGSTSSTAESPGPGTSPSGE |
| | SSTAPGSEPATSGSETPGSEPATSGSETPGTSTEPSEGSAPGSTSSTAESPGPGTSTPESGSASPGS |
| | TSESPSGTAPGTSTEPSEGSAPGTSTEPSEGSAPGTSTEPSEGSAPGSSTPSGATGSPGSSPSASTG |
| | TGPGASPGTSSTGSPGSEPATSGSETPGTSESATPESGPGSPAGSPTSTEEGSSTPSGATGSPGSSP |
| | SASTGTGPGASPGTSSTGSPGTSESATPESGPGTSTEPSEGSAPGTSTEPSEGSAP |
| FVIII- | ATRRYYLGAVELSWDYMQSDLGELPVDARFPPRVPKSFPFNTSVVYKKTLFVEFTDHLFNIAK |
| AM1318 | PRPPWMGLLGPTIQAEVYDTVVITLKNMASHPVSLHAVGVSYWKASEGAEYDDQTSQREKED |
| | DKVFPGGSHTYVWQVLKENGPMASDPLCLTYSYLSHVDLVKDLNSGLIGALLVCREGSLAKE |
| | KTQTLHKFILLFAVFDEGKSWHSETKNSLMQDRDAASARAWPKMHTVNGYVNRSLPGLIGCH |
| | RKSVYWHVIGMGTTPEVHSIFLEGHTFLVRNHRQASLEISPITFLTAQTLLMDLGQFLLFCHISS |
| | HQHDGMEAYVKVDSCPEEPQLRMKNNEEAEDYDDDLTDSEMDVVRFDDDNSPSFIQIRSVAK |
| | KHPKTWVHYIAAEEEDWDYAPLVLAPDDRSYKSQYLNNGPQRIGRKYKKVRFMAYTDETFK |
| | TREAIQHESGILGPLLYGEVGDTLLIIFKNQASRPYNIYPHGITDVRPLYSRRLPKGVKHLKDFPI |
| | LPGEIFKYKWTVTVEDGPTKSDPRCLTRYYSSFVNMERDLASGLIGPLLICYKESVDQRGNQIM |
| | SDKRNVILFSVFDENRSWYLTENIQRFLPNPAGVQLEDPEFQASNIMHSINGYVFDSLQLSVCL |
| | HEVAYWYILSIGAQTDFLSVFFSGYTFKHKMVYEDTLTLFPFSGETVFMSMENPGLWILGCHN |
| | SDFRNRGMTALLKVSSCDKNTGDYYEDSYEDISAYLLSKNNAIEPRSFSQNSRHPSTRQKQFN |
| | ATTIPENDIEKTDPWFAHRTPMPKIQNVSSSDLLMLLRQSPTPHGLSLSDLQEAKYETFSDDPSP |
| | GAIDSNNSLSEMTHFRPQLHHSGDMVFTPESGLQLRLNEKLGTTAATELKKLDFKVSSTSNNLI |
| | STIPSDNLAAGTDNTSSLGPPSMPVHYDSQLDTTLFGKKSSPLTESGGPLSLSEENNDSKLLESG |
| | LMNSQESSWGKNVSSTESGRLFKGKRAHGPALLTKDNALFKVSISLLKTNKTSNNSATNRKTH |
| | IDGPSLLIENSPSVWQNILESDTEFKKVTPLIHDRMLMDKNATALRLNHMSNKTTSSKNMEMV |
| | QQKKEGPIPPDAQNPDMSFFKMLFLPESARWIQRTHGKNSLNSGQGPSPKQLVSLGPEKSVEG |
| | QNFLSEKNKVVVGKGEFTKDVGLKEMVFPSSRNLFLTNLDNLHENNTHNQEKKIQEEIEKKET |
| | LIQENVVLPQIHTVTGTKNFMKNLFLLSTRQNVEGSYDGAYAPVLQDFRSLNDSTNRTKKHTA |
| | HFSKKGEEENLEGLGNQTKQIVEKYACTTRISPNTSQQNFVTQRSKRALKQFRLPLEETELEKRI |
| | IVDDTSTQWSKNMKHLTPSTLTQIDYNEKEKGAITQSPLSDCLTRSHSIPQANRSPLPIAKVSSFP |
| | SIRPIYLTRVLFQDNSSHLPAASYRKKDSGVQESSHFLQGAKKNNLSLAILTLEMTGDQREVGS |
| | LGTSATNSVTYKKVENTVLPKPDLPKTSGKVELLPKVHIYQKDLFPTETSNGSPGHLDLVEGSL |
| | LQGTEGAIKWNEANRPGKVPFLRVATESSAKTPSKLLDPLAWDNHYGTQIPKEEWKSQEKSPE |
| | KTAFKKKDTILSLNACESNHAIAAINEGQNKPEIEVTWAKQGRTERLCSQNPPVLKRHQREITR |
| | TTLQSDQEEIDYDDTISVEMKKEDFDIYDEDENQSPRSFQKKTRHYFIAAVERLWDYGMSSSPH |
| | VLRNRAQSGSVPQFKKVVFQEFTDGSFTQPLYRGELNEHLGLLGPYIRAEVEDNIMVTFRNQA |
| | SRPYSFYSSLISYEEDQRQGAEPRKNFVKPNETKTYFWKVQHHMAPTKDEFDCKAWAYFSDV |
| | DLEKDVHSGLIGPLLVCHTNTLNPAHGRQVTVQEFALFFTIFDETKSWYFTENMERNCRAPCNI |
| | QMEDPTFKENYRFHAINGYIMDTLPGLVMAQDQRIRWYLLSMGSNENIHSIHFSGHVFTVRKK |
| | EEYKMALYNLYPGVFETVEMLPSKAGIWRVECLIGEHLHAGMSTLFLVYSNKCQTPLGMASG |
| | HIRDFQITASGQYGQWAPKLARLHYSGSINAWSTKEPFSWIKVDLLAPMIIHGIKTQGARQKFS |
| | SLYISQFIIMYSLDGKKWQTYRGNSTGTLMVFFGNVDSSGIKHNIFNPPIIARYIRLHPTHYSIRS |
| | TLRMELMGCDLNSCSMPLGMESKAISDAQITASSYFTNMFATWSPSKARLHLQGRSNAWRPQ |
| | VNNPKEWLQVDFQKTMKVTGVTTQGVKSLLTSMYVKEFLISSSQDGHQWTLFFQNGKVKVF |
| | QGNQDSFTPVVNSLDPPLLTRYLRIHPQSWVHQIALRMEVLGCEAQDLYGGTSTEPSEGSAPGS |
| | EPATSGSETPGSPAGSPTSTEEGSTSSTAESPGPGTSTPESGSASPGSTSESPSGTAPGSTSESPSGT |
| | APGTSTPESGSASPGTSTPESGSASPGSEPATSGSETPGTSESATPESGPGSPAGSPTSTEEGTSTE |
| | PSEGSAPGTSESATPESGPGTSTEPSEGSAPGTSTEPSEGSAPGSPAGSPTSTEEGTSTEPSEGSAP |
| | GTSTEPSEGSAPGTSESATPESGPGTSESATPESGPGTSTEPSEGSAPGTSTEPSEGSAPGTSESAT |
| | PESGPGTSTEPSEGSAPGSEPATSGSETPGSPAGSPTSTEEGSSTPSGATGSPGTPGSGTASSSPGS |
| | STPSGATGSPGTSTEPSEGSAPGTSTEPSEGSAPGSEPATSGSETPGSPAGSPTSTEEGSPAGSPTS |
| | TEEGTSTEPSEGSAPGPEPTGPAPSGGSEPATSGSETPGTSESATPESGPGSPAGSPTSTEEGTSES |
| | ATPESGPGSPAGSPTSTEEGSPAGSPTSTEEGTSESATPESGPGSPAGSPTSTEEGSPAGSPTSTEE |
| | GSTSSTAESPGPGSTSESPSGTAPGTSPSGESSTAPGSTSESPSGTAPGSTSESPSGTAPGTSPSGES |
| | STAPGTSTEPSEGSAPGTSESATPESGPGTSESATPESGPGSEPATSGSETPGTSESATPESGPGTS |
| | ESATPESGPGTSTEPSEGSAPGTSESATPESGPGTSTEPSEGSAPGTSPSGESSTAPGTSPSGESST |
| | APGTSPSGESSTAPGTSTEPSEGSAPGSPAGSPTSTEEGTSTEPSEGSAPGSSPSASTGTGPGSSTP |
| | SGATGSPGSSTPSGATGSPGSSTPSGATGSPGSSTPSGATGSPGASPGTSSTGSPGASASGAPSTG |
| | GTSPSGESSTAPGSTSSTAESPGPGTSPSGESSTAPGTSESATPESGPGTSTEPSEGSAPGTSTEPSE |
| | GSAPGSSPSASTGTGPGSSTPSGATGSPGASPGTSSTGSPGTSTPESGSASPGTSPSGESSTAPGTS |
| | PSGESSTAPGTSESATPESGPGSEPATSGSETPGTSTEPSEGSAPGSTSESPSGTAPGSTSESPSGT |
| | APGTSTPESGSASPGSPAGSPTSTEEGTSESATPESGPGTSTEPSEGSAPGSPAGSPTSTEEGTSES |
| | ATPESGPGSEPATSGSETPGSSTPSGATGSPGASPGTSSTGSPGSSTPSGATGSPGSTSESPSGTAP |
| | GTSPSGESSTAPGSTSSTAESPGPGSSTPSGATGSPGASPGTSSTGSPGTPGSGTASSSPGSPAGSP |
| | TSTEEGSPAGSPTSTEEGTSTEPSEGSAP |
| AE144- | GSEPATSGSETPGTSESATPESGPGSEPATSGSETPGSPAGSPTSTEEGTSTEPSEGSAPGSEPATS |
| FVIII | GSETPGSEPATSGSETPGSEPATSGSETPGTSTEPSEGSAPGTSESATPESGPGSEPATSGSETPGT |
| | STEPSEGSAPGATRRYYLGAVELSWDYMQSDLGELPVDARFPPRVPKSFPFNTSVVYKKTLFV |
| | EFTDHLFNIAKPRPPWMGLLGPTIQAEVYDTVVITLKNMASHPVSLHAVGVSYWKASEGAEY |
| | DDQTSQREKEDDKVFPGGSHTYVWQVLKENGPMASDPLCLTYSYLSHVDLVKDLNSGLIGAL |
| | LVCREGSLAKEKTQTLHKFILLFAVFDEGKSWHSETKNSLMQDRDAASARAWPKMHTVNGY |
| | VNRSLPGLIGCHRKSVYWHVIGMGTTPEVHSIFLEGHTFLVRNHRQASLEISPITFLTAQTLLMD |
| | LGQFLLFCHISSHQHDGMEAYVKVDSCPEEPQLRMKNNEEAEDYDDDLTDSEMDVVRFDDD |
| | NSPSFIQIRSVAKKHPKTWVHYIAAEEEDWDYAPLVLAPDDRSYKSQYLNNGPQRIGRKYKKV |
| | RFMAYTDETFKTREAIQHESGILGPLLYGEVGDTLLIIFKNQASRPYNIYPHGITDVRPLYSRRLP |
| | KGVKHLKDFPILPGEIFKYKWTVTVEDGPTKSDPRCLTRYYSSFVNMERDLASGLIGPLLICYK |
| | ESVDQRGNQIMSDKRNVILFSVFDENRSWYLTENIQRFLPNPAGVQLEDPEFQASNIMHSINGY |
| | VFDSLQLSVCLHEVAYWYILSIGAQTDFLSVFFSGYTFKHKMVYEDTLTLFPFSGETVFMSME |
| | NPGLWILGCHNSDFRNRGMTALLKVSSCDKNTGDYYEDSYEDISAYLLSKNNAIEPRSFSQNS |
| | RHPSTRQKQFNATTIPENDIEKTDPWFAHRTPMPKIQNVSSSDLLMLLRQSPTPHGLSLSDLQE |
| | AKYETFSDDPSPGAIDSNNSLSEMTHFRPQLHHSGDMVFTPESGLQLRLNEKLGTTAATELKKL |
| | DFKVSSTSNNLISTIPSDNLAAGTDNTSSLGPPSMPVHYDSQLDTTLFGKKSSPLTESGGPLSLSE |
| | ENNDSKLLESGLMNSQESSWGKNVSSTESGRLFKGKRAHGPALLTKDNALFKVSISLLKTNKT |
| | SNNSATNRKTHIDGPSLLIENSPSVWQNILESDTEFKKVTPLIHDRMLMDKNATALRLNHMSN |
| | KTTSSKNMEMVQQKKEGPIPPDAQNPDMSFFKMLFLPESARWIQRTHGKNSLNSGQGPSPKQL |
| | VSLGPEKSVEGQNFLSEKNKVVVGKGEFTKDVGLKEMVFPSSRNLFLTNLDNLHENNTHNQE |
| | KKIQEEIEKKETLIQENVVLPQIHTVTGTKNFMKNLFLLSTRQNVEGSYDGAYAPVLQDFRSLN |
| | DSTNRTKKHTAHFSKKGEEENLEGLGNQTKQIVEKYACTTRISPNTSQQNFVTQRSKRALKQF |
| | RLPLEETELEKRIIVDDTSTQWSKNMKHLTPSTLTQIDYNEKEKGAITQSPLSDCLTRSHSIPQA |
| | NRSPLPIAKVSSFPSIRPIYLTRVLFQDNSSHLPAASYRKKDSGVQESSHFLQGAKKNNLSLAILT |
| | LEMTGDQREVGSLGTSATNSVTYKKVENTVLPKPDLPKTSGKVELLPKVHIYQKDLFPTETSN |
| | GSPGHLDLVEGSLLQGTEGAIKWNEANRPGKVPFLRVATESSAKTPSKLLDPLAWDNHYGTQI |
| | PKEEWKSQEKSPEKTAFKKKDTILSLNACESNHAIAAINEGQNKPEIEVTWAKQGRTERLCSQN |
| | PPVLKRHQREITRTTLQSDQEEIDYDDTISVEMKKEDFDIYDEDENQSPRSFQKKTRHYFIAAVE |
| | RLWDYGMSSSPHVLRNRAQSGSVPQFKKVVFQEFTDGSFTQPLYRGELNEHLGLLGPYIRAEV |
| | EDNIMVTFRNQASRPYSFYSSLISYEEDQRQGAEPRKNFVKPNETKTYFWKVQHHMAPTKDEF |
| | DCKAWAYFSDVDLEKDVHSGLIGPLLVCHTNTLNPAHGRQVTVQEFALFFTIFDETKSWYFTE |
| | NMERNCRAPCNIQMEDPTFKENYRFHAINGYIMDTLPGLVMAQDQRIRWYLLSMGSNENIHSI |
| | HFSGHVFTVRKKEEYKMALYNLYPGVFETVEMLPSKAGIWRVECLIGEHLHAGMSTLFLVYS |
| | NKCQTPLGMASGHIRDFQITASGQYGQWAPKLARLHYSGSINAWSTKEPFSWIKVDLLAPMII |
| | HGIKTQGARQKFSSLYISQFIIMYSLDGKKWQTYRGNSTGTLMVFFGNVDSSGIKHNIFNPPIIA |
| | RYIRLHPTHYSIRSTLRMELMGCDLNSCSMPLGMESKAISDAQITASSYFTNMFATWSPSKARL |
| | HLQGRSNAWRPQVNNPKEWLQVDFQKTMKVTGVTTQGVKSLLTSMYVKEFLISSSQDGHQW |
| | TLFFQNGKVKVFQGNQDSFTPVVNSLDPPLLTRYLRIHPQSWVHQIALRMEVLGCEAQDLY |
| AE288- | GTSESATPESGPGSEPATSGSETPGTSESATPESGPGSEPATSGSETPGTSESATPESGPGTSTEPS |
| FVIII | EGSAPGSPAGSPTSTEEGTSESATPESGPGSEPATSGSETPGTSESATPESGPGSPAGSPTSTEEGS |
| | PAGSPTSTEEGTSTEPSEGSAPGTSESATPESGPGTSESATPESGPGTSESATPESGPGSEPATSGS |
| | ETPGSEPATSGSETPGSPAGSPTSTEEGTSTEPSEGSAPGTSTEPSEGSAPGSEPATSGSETPGTSE |
| | SATPESGPGTSTEPSEGSAPGATRRYYLGAVELSWDYMQSDLGELPVDARFPPRVPKSFPFNTS |
| | VVYKKTLFVEFTDHLFNIAKPRPPWMGLLGPTIQAEVYDTVVITLKNMASHPVSLHAVGVSY |
| | WKASEGAEYDDQTSQREKEDDKVFPGGSHTYVWQVLKENGPMASDPLCLTYSYLSHVDLVK |
| | DLNSGLIGALLVCREGSLAKEKTQTLHKFILLFAVFDEGKSWHSETKNSLMQDRDAASARAWP |
| | KMHTVNGYVNRSLPGLIGCHRKSVYWHVIGMGTTPEVHSIFLEGHTFLVRNHRQASLEISPITF |
| | LTAQTLLMDLGQFLLFCHISSHQHDGMEAYVKVDSCPEEPQLRMKNNEEAEDYDDDLTDSEM |
| | DVVRFDDDNSPSFIQIRSVAKKHPKTWVHYIAAEEEDWDYAPLVLAPDDRSYKSQYLNNGPQ |
| | RIGRKYKKVRFMAYTDETFKTREAIQHESGILGPLLYGEVGDTLLIIFKNQASRPYNIYPHGITD |
| | VRPLYSRRLPKGVKHLKDFPILPGEIFKYKWTVTVEDGPTKSDPRCLTRYYSSFVNMERDLAS |
| | GLIGPLLICYKESVDQRGNQIMSDKRNVILFSVFDENRSWYLTENIQRFLPNPAGVQLEDPEFQA |
| | SNIMHSINGYVFDSLQLSVCLHEVAYWYILSIGAQTDFLSVFFSGYTFKHKMVYEDTLTLFPFS |
| | GETVFMSMENPGLWILGCHNSDFRNRGMTALLKVSSCDKNTGDYYEDSYEDISAYLLSKNNA |
| | IEPRSFSQNSRHPSTRQKQFNATTIPENDIEKTDPWFAHRTPMPKIQNVSSSDLLMLLRQSPTPH |
| | GLSLSDLQEAKYETFSDDPSPGAIDSNNSLSEMTHFRPQLHHSGDMVFTPESGLQLRLNEKLGT |
| | TAATELKKLDFKVSSTSNNLISTIPSDNLAAGTDNTSSLGPPSMPVHYDSQLDTTLFGKKSSPLT |
| | ESGGPLSLSEENNDSKLLESGLMNSQESSWGKNVSSTESGRLFKGKRAHGPALLTKDNALFKV |
| | SISLLKTNKTSNNSATNRKTHIDGPSLLIENSPSVWQNILESDTEFKKVTPLIHDRMLMDKNATA |
| | LRLNHMSNKTTSSKNMEMVQQKKEGPIPPDAQNPDMSFFKMLFLPESARWIQRTHGKNSLNS |
| | GQGPSPKQLVSLGPEKSVEGQNFLSEKNKVVVGKGEFTKDVGLKEMVFPSSRNLFLTNLDNLH |
| | ENNTHNQEKKIQEEIEKKETLIQENVVLPQIHTVTGTKNFMKNLFLLSTRQNVEGSYDGAYAPV |
| | LQDFRSLNDSTNRTKKHTAHFSKKGEEENLEGLGNQTKQIVEKYACTTRISPNTSQQNFVTQRS |
| | KRALKQFRLPLEETELEKRIIVDDTSTQWSKNMKHLTPSTLTQIDYNEKEKGAITQSPLSDCLTR |
| | SHSIPQANRSPLPIAKVSSFPSIRPIYLTRVLFQDNSSHLPAASYRKKDSGVQESSHFLQGAKKNN |
| | LSLAILTLEMTGDQREVGSLGTSATNSVTYKKVENTVLPKPDLPKTSGKVELLPKVHIYQKDLF |
| | PTETSNGSPGHLDLVEGSLLQGTEGAIKWNEANRPGKVPFLRVATESSAKTPSKLLDPLAWDN |
| | HYGTQIPKEEWKSQEKSPEKTAFKKKDTILSLNACESNHAIAAINEGQNKPEIEVTWAKQGRTE |
| | RLCSQNPPVLKRHQREITRTTLQSDQEEIDYDDTISVEMKKEDFDIYDEDENQSPRSFQKKTRH |
| | YFIAAVERLWDYGMSSSPHVLRNRAQSGSVPQFKKVVFQEFTDGSFTQPLYRGELNEHLGLLG |
| | PYIRAEVEDNIMVTFRNQASRPYSFYSSLISYEEDQRQGAEPRKNFVKPNETKTYFWKVQHHM |
| | APTKDEFDCKAWAYFSDVDLEKDVHSGLIGPLLVCHTNTLNPAHGRQVTVQEFALFFTIFDET |
| | KSWYFTENMERNCRAPCNIQMEDPTFKENYRFHAINGYIMDTLPGLVMAQDQRIRWYLLSMG |
| | SNENIHSIHFSGHVFTVRKKEEYKMALYNLYPGVFETVEMLPSKAGIWRVECLIGEHLHAGMS |
| | TLFLVYSNKCQTPLGMASGHIRDFQITASGQYGQWAPKLARLHYSGSINAWSTKEPFSWIKVD |
| | LLAPMIIHGIKTQGARQKFSSLYISQFIIMYSLDGKKWQTYRGNSTGTLMVFFGNVDSSGIKHNI |
| | FNPPIIARYIRLHPTHYSIRSTLRMELMGCDLNSCSMPLGMESKAISDAQITASSYFTNMFATWS |
| | PSKARLHLQGRSNAWRPQVNNPKEWLQVDFQKTMKVTGVTTQGVKSLLTSMYVKEFLISSSQ |
| | DGHQWTLFFQNGKVKVFQGNQDSFTPVVNSLDPPLLTRYLRIHPQSWVHQIALRMEVLGCEA |
| | QDLY |
| AE576- | GSPAGSPTSTEEGTSESATPESGPGTSTEPSEGSAPGSPAGSPTSTEEGTSTEPSEGSAPGTSTEPS |
| FVIII | EGSAPGTSESATPESGPGSEPATSGSETPGSEPATSGSETPGSPAGSPTSTEEGTSESATPESGPGT |
| | STEPSEGSAPGTSTEPSEGSAPGSPAGSPTSTEEGTSTEPSEGSAPGTSTEPSEGSAPGTSESATPE |
| | SGPGTSTEPSEGSAPGTSESATPESGPGSEPATSGSETPGTSTEPSEGSAPGTSTEPSEGSAPGTSE |
| | SATPESGPGTSESATPESGPGSPAGSPTSTEEGTSESATPESGPGSEPATSGSETPGTSESATPESG |
| | PGTSTEPSEGSAPGTSTEPSEGSAPGTSTEPSEGSAPGTSTEPSEGSAPGTSTEPSEGSAPGTSTEP |
| | SEGSAPGSPAGSPTSTEEGTSTEPSEGSAPGTSESATPESGPGSEPATSGSETPGTSESATPESGPG |
| | SEPATSGSETPGTSESATPESGPGTSTEPSEGSAPGTSESATPESGPGSPAGSPTSTEEGSPAGSPT |
| | STEEGSPAGSPTSTEEGTSESATPESGPGTSTEPSEGSAPGATRRYYLGAVELSWDYMQSDLGE |
| | LPVDARFPPRVPKSFPFNTSVVYKKTLFVEFTDHLFNIAKPRPPWMGLLGPTIQAEVYDTVVITL |
| | KNMASHPVSLHAVGVSYWKASEGAEYDDQTSQREKEDDKVFPGGSHTYVWQVLKENGPMA |
| | SDPLCLTYSYLSHVDLVKDLNSGLIGALLVCREGSLAKEKTQTLHKFILLFAVFDEGKSWHSET |
| | KNSLMQDRDAASARAWPKMHTVNGYVNRSLPGLIGCHRKSVYWHVIGMGTTPEVHSIFLEG |
| | HTFLVRNHRQASLEISPITFLTAQTLLMDLGQFLLFCHISSHQHDGMEAYVKVDSCPEEPQLRM |
| | KNNEEAEDYDDDLTDSEMDVVRFDDDNSPSFIQIRSVAKKHPKTWVHYIAAEEEDWDYAPLV |
| | LAPDDRSYKSQYLNNGPQRIGRKYKKVRFMAYTDETFKTREAIQHESGILGPLLYGEVGDTLLI |
| | IFKNQASRPYNIYPHGITDVRPLYSRRLPKGVKHLKDFPILPGEIFKYKWTVTVEDGPTKSDPRC |
| | LTRYYSSFVNMERDLASGLIGPLLICYKESVDQRGNQIMSDKRNVILFSVFDENRSWYLTENIQ |
| | RFLPNPAGVQLEDPEFQASNIMHSINGYVFDSLQLSVCLHEVAYWYILSIGAQTDFLSVFFSGY |
| | TFKHKMVYEDTLTLFPFSGETVFMSMENPGLWILGCHNSDFRNRGMTALLKVSSCDKNTGDY |
| | YEDSYEDISAYLLSKNNAIEPRSFSQNSRHPSTRQKQFNATTIPENDIEKTDPWFAHRTPMPKIQ |
| | NVSSSDLLMLLRQSPTPHGLSLSDLQEAKYETFSDDPSPGAIDSNNSLSEMTHFRPQLHHSGDM |
| | VFTPESGLQLRLNEKLGTTAATELKKLDFKVSSTSNNLISTIPSDNLAAGTDNTSSLGPPSMPVH |
| | YDSQLDTTLFGKKSSPLTESGGPLSLSEENNDSKLLESGLMNSQESSWGKNVSSTESGRLFKGK |
| | RAHGPALLTKDNALFKVSISLLKTNKTSNNSATNRKTHIDGPSLLIENSPSVWQNILESDTEFKK |
| | VTPLIHDRMLMDKNATALRLNHMSNKTTSSKNMEMVQQKKEGPIPPDAQNPDMSFFKMLFLP |
| | ESARWIQRTHGKNSLNSGQGPSPKQLVSLGPEKSVEGQNFLSEKNKVVVGKGEFTKDVGLKE |
| | MVFPSSRNLFLTNLDNLHENNTHNQEKKIQEEIEKKETLIQENVVLPQIHTVTGTKNFMKNLFL |
| | LSTRQNVEGSYDGAYAPVLQDFRSLNDSTNRTKKHTAHFSKKGEEENLEGLGNQTKQIVEKY |
| | ACTTRISPNTSQQNFVTQRSKRALKQFRLPLEETELEKRIIVDDTSTQWSKNMKHLTPSTLTQID |
| | YNEKEKGAITQSPLSDCLTRSHSIPQANRSPLPIAKVSSFPSIRPIYLTRVLFQDNSSHLPAASYRK |
| | KDSGVQESSHFLQGAKKNNLSLAILTLEMTGDQREVGSLGTSATNSVTYKKVENTVLPKPDLP |
| | KTSGKVELLPKVHIYQKDLFPTETSNGSPGHLDLVEGSLLQGTEGAIKWNEANRPGKVPFLRV |
| | ATESSAKTPSKLLDPLAWDNHYGTQIPKEEWKSQEKSPEKTAFKKKDTILSLNACESNHAIAAI |
| | NEGQNKPEIEVTWAKQGRTERLCSQNPPVLKRHQREITRTTLQSDQEEIDYDDTISVEMKKEDF |
| | DIYDEDENQSPRSFQKKTRHYFIAAVERLWDYGMSSSPHVLRNRAQSGSVPQFKKVVFQEFTD |
| | GSFTQPLYRGELNEHLGLLGPYIRAEVEDNIMVTFRNQASRPYSFYSSLISYEEDQRQGAEPRK |
| | NFVKPNETKTYFWKVQHHMAPTKDEFDCKAWAYFSDVDLEKDVHSGLIGPLLVCHTNTLNP |
| | AHGRQVTVQEFALFFTIFDETKSWYFTENMERNCRAPCNIQMEDPTFKENYRFHAINGYIMDT |
| | LPGLVMAQDQRIRWYLLSMGSNENIHSIHFSGHVFTVRKKEEYKMALYNLYPGVFETVEMLPS |
| | KAGIWRVECLIGEHLHAGMSTLFLVYSNKCQTPLGMASGHIRDFQITASGQYGQWAPKLARL |
| | HYSGSINAWSTKEPFSWIKVDLLAPMIIHGIKTQGARQKFSSLYISQFIIMYSLDGKKWQTYRGN |
| | STGTLMVFFGNVDSSGIKHNIFNPPIIARYIRLHPTHYSIRSTLRMELMGCDLNSCSMPLGMESK |
| | AISDAQITASSYFTNMFATWSPSKARLHLQGRSNAWRPQVNNPKEWLQVDFQKTMKVTGVTT |
| | QGVKSLLTSMYVKEFLISSSQDGHQWTLFFQNGKVKVFQGNQDSFTPVVNSLDPPLLTRYLRI |
| | HPQSWVHQIALRMEVLGCEAQDLY |
| AF576- | GSTSSTAESPGPGSTSSTAESPGPGSTSESPSGTAPGSTSSTAESPGPGSTSSTAESPGPGTSTPESG |
| FVIII | SASPGSTSESPSGTAPGTSPSGESSTAPGSTSESPSGTAPGSTSESPSGTAPGTSPSGESSTAPGSTS |
| | ESPSGTAPGSTSESPSGTAPGTSPSGESSTAPGSTSESPSGTAPGSTSESPSGTAPGSTSESPSGTAP |
| | GTSTPESGSASPGSTSESPSGTAPGTSTPESGSASPGSTSSTAESPGPGSTSSTAESPGPGTSTPESG |
| | SASPGTSTPESGSASPGSTSESPSGTAPGTSTPESGSASPGTSTPESGSASPGSTSESPSGTAPGSTS |
| | ESPSGTAPGSTSESPSGTAPGSTSSTAESPGPGTSTPESGSASPGTSTPESGSASPGSTSESPSGTAP |
| | GSTSESPSGTAPGTSTPESGSASPGSTSESPSGTAPGSTSESPSGTAPGTSTPESGSASPGTSPSGES |
| | STAPGSTSSTAESPGPGTSPSGESSTAPGSTSSTAESPGPGTSTPESGSASPGSTSESPSGTAPGSTS |
| | STAESPGPGTSTPESGSASPGTSTPESGSASPGATRRYYLGAVELSWDYMQSDLGELPVDARFP |
| | PRVPKSFPFNTSVVYKKTLFVEFTDHLFNIAKPRPPWMGLLGPTIQAEVYDTVVITLKNMASHP |
| | VSLHAVGVSYWKASEGAEYDDQTSQREKEDDKVFPGGSHTYVWQVLKENGPMASDPLCLTY |
| | SYLSHVDLVKDLNSGLIGALLVCREGSLAKEKTQTLHKFILLFAVFDEGKSWHSETKNSLMQD |
| | RDAASARAWPKMHTVNGYVNRSLPGLIGCHRKSVYWHVIGMGTTPEVHSIFLEGHTFLVRNH |
| | RQASLEISPITFLTAQTLLMDLGQFLLFCHISSHQHDGMEAYVKVDSCPEEPQLRMKNNEEAED |
| | YDDDLTDSEMDVVRFDDDNSPSFIQIRSVAKKHPKTWVHYIAAEEEDWDYAPLVLAPDDRSY |
| | KSQYLNNGPQRIGRKYKKVRFMAYTDETFKTREAIQHESGILGPLLYGEVGDTLLIIFKNQASR |
| | PYNIYPHGITDVRPLYSRRLPKGVKHLKDFPILPGEIFKYKWTVTVEDGPTKSDPRCLTRYYSSF |
| | VNMERDLASGLIGPLLICYKESVDQRGNQIMSDKRNVILFSVFDENRSWYLTENIQRFLPNPAG |
| | VQLEDPEFQASNIMHSINGYVFDSLQLSVCLHEVAYWYILSIGAQTDFLSVFFSGYTFKHKMVY |
| | EDTLTLFPFSGETVFMSMENPGLWILGCHNSDFRNRGMTALLKVSSCDKNTGDYYEDSYEDIS |
| | AYLLSKNNAIEPRSFSQNSRHPSTRQKQFNATTIPENDIEKTDPWFAHRTPMPKIQNVSSSDLLM |
| | LLRQSPTPHGLSLSDLQEAKYETFSDDPSPGAIDSNNSLSEMTHFRPQLHHSGDMVFTPESGLQ |
| | LRLNEKLGTTAATELKKLDFKVSSTSNNLISTIPSDNLAAGTDNTSSLGPPSMPVHYDSQLDTTL |
| | FGKKSSPLTESGGPLSLSEENNDSKLLESGLMNSQESSWGKNVSSTESGRLFKGKRAHGPALLT |
| | KDNALFKVSISLLKTNKTSNNSATNRKTHIDGPSLLIENSPSVWQNILESDTEFKKVTPLIHDRM |
| | LMDKNATALRLNHMSNKTTSSKNMEMVQQKKEGPIPPDAQNPDMSFFKMLFLPESARWIQRT |
| | HGKNSLNSGQGPSPKQLVSLGPEKSVEGQNFLSEKNKVVVGKGEFTKDVGLKEMVFPSSRNLF |
| | LTNLDNLHENNTHNQEKKIQEEIEKKETLIQENVVLPQIHTVTGTKNFMKNLFLLSTRQNVEGS |
| | YDGAYAPVLQDFRSLNDSTNRTKKHTAHFSKKGEEENLEGLGNQTKQIVEKYACTTRISPNTS |
| | QQNFVTQRSKRALKQFRLPLEETELEKRIIVDDTSTQWSKNMKHLTPSTLTQIDYNEKEKGAIT |
| | QSPLSDCLTRSHSIPQANRSPLPIAKVSSFPSIRPIYLTRVLFQDNSSHLPAASYRKKDSGVQESS |
| | HFLQGAKKNNLSLAILTLEMTGDQREVGSLGTSATNSVTYKKVENTVLPKPDLPKTSGKVELL |
| | PKVHIYQKDLFPTETSNGSPGHLDLVEGSLLQGTEGAIKWNEANRPGKVPFLRVATESSAKTPS |
| | KLLDPLAWDNHYGTQIPKEEWKSQEKSPEKTAFKKKDTILSLNACESNHAIAAINEGQNKPEIE |
| | VTWAKQGRTERLCSQNPPVLKRHQREITRTTLQSDQEEIDYDDTISVEMKKEDFDIYDEDENQS |
| | PRSFQKKTRHYFIAAVERLWDYGMSSSPHVLRNRAQSGSVPQFKKVVFQEFTDGSFTQPLYRG |
| | ELNEHLGLLGPYIRAEVEDNIMVTFRNQASRPYSFYSSLISYEEDQRQGAEPRKNFVKPNETKT |
| | YFWKVQHHMAPTKDEFDCKAWAYFSDVDLEKDVHSGLIGPLLVCHTNTLNPAHGRQVTVQE |
| | FALFFTIFDETKSWYFTENMERNCRAPCNIQMEDPTFKENYRFHAINGYIMDTLPGLVMAQDQ |
| | RIRWYLLSMGSNENIHSIHFSGHVFTVRKKEEYKMALYNLYPGVFETVEMLPSKAGIWRVECL |
| | IGEHLHAGMSTLFLVYSNKCQTPLGMASGHIRDFQITASGQYGQWAPKLARLHYSGSINAWST |
| | KEPFSWIKVDLLAPMIIHGIKTQGARQKFSSLYISQFIIMYSLDGKKWQTYRGNSTGTLMVFFG |
| | NVDSSGIKHNIFNPPIIARYIRLHPTHYSIRSTLRMELMGCDLNSCSMPLGMESKAISDAQITASS |
| | YFTNMFATWSPSKARLHLQGRSNAWRPQVNNPKEWLQVDFQKTMKVTGVTTQGVKSLLTS |
| | MYVKEFLISSSQDGHQWTLFFQNGKVKVFQGNQDSFTPVVNSLDPPLLTRYLRIHPQSWVHQI |
| | ALRMEVLGCEAQDLY |
| AE864- | GSPAGSPTSTEEGTSESATPESGPGTSTEPSEGSAPGSPAGSPTSTEEGTSTEPSEGSAPGTSTEPS |
| FVIII | EGSAPGTSESATPESGPGSEPATSGSETPGSEPATSGSETPGSPAGSPTSTEEGTSESATPESGPGT |
| | STEPSEGSAPGTSTEPSEGSAPGSPAGSPTSTEEGTSTEPSEGSAPGTSTEPSEGSAPGTSESATPE |
| | SGPGTSTEPSEGSAPGTSESATPESGPGSEPATSGSETPGTSTEPSEGSAPGTSTEPSEGSAPGTSE |
| | SATPESGPGTSESATPESGPGSPAGSPTSTEEGTSESATPESGPGSEPATSGSETPGTSESATPESG |
| | PGTSTEPSEGSAPGTSTEPSEGSAPGTSTEPSEGSAPGTSTEPSEGSAPGTSTEPSEGSAPGTSTEP |
| | SEGSAPGSPAGSPTSTEEGTSTEPSEGSAPGTSESATPESGPGSEPATSGSETPGTSESATPESGPG |
| | SEPATSGSETPGTSESATPESGPGTSTEPSEGSAPGTSESATPESGPGSPAGSPTSTEEGSPAGSPT |
| | STEEGSPAGSPTSTEEGTSESATPESGPGTSTEPSEGSAPGTSESATPESGPGSEPATSGSETPGTS |
| | ESATPESGPGSEPATSGSETPGTSESATPESGPGTSTEPSEGSAPGSPAGSPTSTEEGTSESATPES |
| | GPGSEPATSGSETPGTSESATPESGPGSPAGSPTSTEEGSPAGSPTSTEEGTSTEPSEGSAPGTSES |
| | ATPESGPGTSESATPESGPGTSESATPESGPGSEPATSGSETPGSEPATSGSETPGSPAGSPTSTEE |
| | GTSTEPSEGSAPGTSTEPSEGSAPGSEPATSGSETPGTSESATPESGPGTSTEPSEGSAPGATRRY |
| | YLGAVELSWDYMQSDLGELPVDARFPPRVPKSFPFNTSVVYKKTLFVEFTDHLFNIAKPRPPW |
| | MGLLGPTIQAEVYDTVVITLKNMASHPVSLHAVGVSYWKASEGAEYDDQTSQREKEDDKVFP |
| | GGSHTYVWQVLKENGPMASDPLCLTYSYLSHVDLVKDLNSGLIGALLVCREGSLAKEKTQTL |
| | HKFILLFAVFDEGKSWHSETKNSLMQDRDAASARAWPKMHTVNGYVNRSLPGLIGCHRKSVY |
| | WHVIGMGTTPEVHSIFLEGHTFLVRNHRQASLEISPITFLTAQTLLMDLGQFLLFCHISSHQHDG |
| | MEAYVKVDSCPEEPQLRMKNNEEAEDYDDDLTDSEMDVVRFDDDNSPSFIQIRSVAKKHPKT |
| | WVHYIAAEEEDWDYAPLVLAPDDRSYKSQYLNNGPQRIGRKYKKVRFMAYTDETFKTREAIQ |
| | HESGILGPLLYGEVGDTLLIIFKNQASRPYNIYPHGITDVRPLYSRRLPKGVKHLKDFPILPGEIF |
| | KYKWTVTVEDGPTKSDPRCLTRYYSSFVNMERDLASGLIGPLLICYKESVDQRGNQIMSDKRN |
| | VILFSVFDENRSWYLTENIQRFLPNPAGVQLEDPEFQASNIMHSINGYVFDSLQLSVCLHEVAY |
| | WYILSIGAQTDFLSVFFSGYTFKHKMVYEDTLTLFPFSGETVFMSMENPGLWILGCHNSDFRNR |
| | GMTALLKVSSCDKNTGDYYEDSYEDISAYLLSKNNAIEPRSFSQNSRHPSTRQKQFNATTIPEN |
| | DIEKTDPWFAHRTPMPKIQNVSSSDLLMLLRQSPTPHGLSLSDLQEAKYETFSDDPSPGAIDSN |
| | NSLSEMTHFRPQLHHSGDMVFTPESGLQLRLNEKLGTTAATELKKLDFKVSSTSNNLISTIPSDN |
| | LAAGTDNTSSLGPPSMPVHYDSQLDTTLFGKKSSPLTESGGPLSLSEENNDSKLLESGLMNSQE |
| | SSWGKNVSSTESGRLFKGKRAHGPALLTKDNALFKVSISLLKTNKTSNNSATNRKTHIDGPSLL |
| | IENSPSVWQNILESDTEFKKVTPLIHDRMLMDKNATALRLNHMSNKTTSSKNMEMVQQKKEG |
| | PIPPDAQNPDMSFFKMLFLPESARWIQRTHGKNSLNSGQGPSPKQLVSLGPEKSVEGQNFLSEK |
| | NKVVVGKGEFTKDVGLKEMVFPSSRNLFLTNLDNLHENNTHNQEKKIQEEIEKKETLIQENVV |
| | LPQIHTVTGTKNFMKNLFLLSTRQNVEGSYDGAYAPVLQDFRSLNDSTNRTKKHTAHFSKKGE |
| | EENLEGLGNQTKQIVEKYACTTRISPNTSQQNFVTQRSKRALKQFRLPLEETELEKRIIVDDTST |
| | QWSKNMKHLTPSTLTQIDYNEKEKGAITQSPLSDCLTRSHSIPQANRSPLPIAKVSSFPSIRPIYL |
| | TRVLFQDNSSHLPAASYRKKDSGVQESSHFLQGAKKNNLSLAILTLEMTGDQREVGSLGTSAT |
| | NSVTYKKVENTVLPKPDLPKTSGKVELLPKVHIYQKDLFPTETSNGSPGHLDLVEGSLLQGTEG |
| | AIKWNEANRPGKVPFLRVATESSAKTPSKLLDPLAWDNHYGTQIPKEEWKSQEKSPEKTAFKK |
| | KDTILSLNACESNHAIAAINEGQNKPEIEVTWAKQGRTERLCSQNPPVLKRHQREITRTTLQSD |
| | QEEIDYDDTISVEMKKEDFDIYDEDENQSPRSFQKKTRHYFIAAVERLWDYGMSSSPHVLRNR |
| | AQSGSVPQFKKVVFQEFTDGSFTQPLYRGELNEHLGLLGPYIRAEVEDNIMVTFRNQASRPYSF |
| | YSSLISYEEDQRQGAEPRKNFVKPNETKTYFWKVQHHMAPTKDEFDCKAWAYFSDVDLEKD |
| | VHSGLIGPLLVCHTNTLNPAHGRQVTVQEFALFFTIFDETKSWYFTENMERNCRAPCNIQMEDP |
| | TFKENYRFHAINGYIMDTLPGLVMAQDQRIRWYLLSMGSNENIHSIHFSGHVFTVRKKEEYKM |
| | ALYNLYPGVFETVEMLPSKAGIWRVECLIGEHLHAGMSTLFLVYSNKCQTPLGMASGHIRDFQ |
| | ITASGQYGQWAPKLARLHYSGSINAWSTKEPFSWIKVDLLAPMIIHGIKTQGARQKFSSLYISQF |
| | IIMYSLDGKKWQTYRGNSTGTLMVFFGNVDSSGIKHNIFNPPIIARYIRLHPTHYSIRSTLRMEL |
| | MGCDLNSCSMPLGMESKAISDAQITASSYFTNMFATWSPSKARLHLQGRSNAWRPQVNNPKE |
| | WLQVDFQKTMKVTGVTTQGVKSLLTSMYVKEFLISSSQDGHQWTLFFQNGKVKVFQGNQDS |
| | FTPVVNSLDPPLLTRYLRIHPQSWVHQIALRMEVLGCEAQDLY |
| AF864- | GSTSESPSGTAPGTSPSGESSTAPGSTSESPSGTAPGSTSESPSGTAPGTSTPESGSASPGTSTPESG |
| FVIII | SASPGSTSESPSGTAPGSTSESPSGTAPGTSPSGESSTAPGSTSESPSGTAPGTSPSGESSTAPGTSP |
| | SGESSTAPGSTSSTAESPGPGTSPSGESSTAPGTSPSGESSTAPGSTSSTAESPGPGTSTPESGSASP |
| | GTSTPESGSASPGSTSESPSGTAPGSTSESPSGTAPGTSTPESGSASPGSTSSTAESPGPGTSTPESG |
| | SASPGSTSESPSGTAPGTSPSGESSTAPGSTSSTAESPGPGTSPSGESSTAPGTSTPESGSASPGSTS |
| | STAESPGPGSTSSTAESPGPGSTSSTAESPGPGSTSSTAESPGPGTSPSGESSTAPGSTSESPSGTAP |
| | GSTSESPSGTAPGTSTPESGPXXXGASASGAPSTXXXXSESPSGTAPGSTSESPSGTAPGSTSESP |
| | SGTAPGSTSESPSGTAPGSTSESPSGTAPGSTSESPSGTAPGTSTPESGSASPGTSPSGESSTAPGT |
| | SPSGESSTAPGSTSSTAESPGPGTSPSGESSTAPGTSTPESGSASPGSTSESPSGTAPGSTSESPSGT |
| | APGTSPSGESSTAPGSTSESPSGTAPGTSTPESGSASPGTSTPESGSASPGSTSESPSGTAPGTSTPE |
| | SGSASPGSTSSTAESPGPGSTSESPSGTAPGSTSESPSGTAPGTSPSGESSTAPGSTSSTAESPGPG |
| | TSPSGESSTAPGTSTPESGSASPGTSPSGESSTAPGTSPSGESSTAPGTSPSGESSTAPGSTSSTAES |
| | PGPGSTSSTAESPGPGTSPSGESSTAPGSSPSASTGTGPGSSTPSGATGSPGSSTPSGATGSPGATR |
| | RYYLGAVELSWDYMQSDLGELPVDARFPPRVPKSFPFNTSVVYKKTLFVEFTDHLFNIAKPRP |
| | PWMGLLGPTIQAEVYDTVVITLKNMASHPVSLHAVGVSYWKASEGAEYDDQTSQREKEDDK |
| | VFPGGSHTYVWQVLKENGPMASDPLCLTYSYLSHVDLVKDLNSGLIGALLVCREGSLAKEKT |
| | QTLHKFILLFAVFDEGKSWHSETKNSLMQDRDAASARAWPKMHTVNGYVNRSLPGLIGCHRK |
| | SVYWHVIGMGTTPEVHSIFLEGHTFLVRNHRQASLEISPITFLTAQTLLMDLGQFLLFCHISSHQ |
| | HDGMEAYVKVDSCPEEPQLRMKNNEEAEDYDDDLTDSEMDVVRFDDDNSPSFIQIRSVAKKH |
| | PKTWVHYIAAEEEDWDYAPLVLAPDDRSYKSQYLNNGPQRIGRKYKKVRFMAYTDETFKTRE |
| | AIQHESGILGPLLYGEVGDTLLIIFKNQASRPYNIYPHGITDVRPLYSRRLPKGVKHLKDFPILPG |
| | EIFKYKWTVTVEDGPTKSDPRCLTRYYSSFVNMERDLASGLIGPLLICYKESVDQRGNQIMSDK |
| | RNVILFSVFDENRSWYLTENIQRFLPNPAGVQLEDPEFQASNIMHSINGYVFDSLQLSVCLHEV |
| | AYWYILSIGAQTDFLSVFFSGYTFKHKMVYEDTLTLFPFSGETVFMSMENPGLWILGCHNSDF |
| | RNRGMTALLKVSSCDKNTGDYYEDSYEDISAYLLSKNNAIEPRSFSQNSRHPSTRQKQFNATTI |
| | PENDIEKTDPWFAHRTPMPKIQNVSSSDLLMLLRQSPTPHGLSLSDLQEAKYETFSDDPSPGAID |
| | SNNSLSEMTHFRPQLHHSGDMVFTPESGLQLRLNEKLGTTAATELKKLDFKVSSTSNNLISTIPS |
| | DNLAAGTDNTSSLGPPSMPVHYDSQLDTTLFGKKSSPLTESGGPLSLSEENNDSKLLESGLMNS |
| | QESSWGKNVSSTESGRLFKGKRAHGPALLTKDNALFKVSISLLKTNKTSNNSATNRKTHIDGPS |
| | LLIENSPSVWQNILESDTEFKKVTPLIHDRMLMDKNATALRLNHMSNKTTSSKNMEMVQQKK |
| | EGPIPPDAQNPDMSFFKMLFLPESARWIQRTHGKNSLNSGQGPSPKQLVSLGPEKSVEGQNFLS |
| | EKNKVVVGKGEFTKDVGLKEMVFPSSRNLFLTNLDNLHENNTHNQEKKIQEEIEKKETLIQEN |
| | VVLPQIHTVTGTKNFMKNLFLLSTRQNVEGSYDGAYAPVLQDFRSLNDSTNRTKKHTAHFSK |
| | KGEEENLEGLGNQTKQIVEKYACTTRISPNTSQQNFVTQRSKRALKQFRLPLEETELEKRIIVDD |
| | TSTQWSKNMKHLTPSTLTQIDYNEKEKGAITQSPLSDCLTRSHSIPQANRSPLPIAKVSSFPSIRPI |
| | YLTRVLFQDNSSHLPAASYRKKDSGVQESSHFLQGAKKNNLSLAILTLEMTGDQREVGSLGTS |
| | ATNSVTYKKVENTVLPKPDLPKTSGKVELLPKVHIYQKDLFPTETSNGSPGHLDLVEGSLLQGT |
| | EGAIKWNEANRPGKVPFLRVATESSAKTPSKLLDPLAWDNHYGTQIPKEEWKSQEKSPEKTAF |
| | KKKDTILSLNACESNHAIAAINEGQNKPEIEVTWAKQGRTERLCSQNPPVLKRHQREITRTTLQ |
| | SDQEEIDYDDTISVEMKKEDFDIYDEDENQSPRSFQKKTRHYFIAAVERLWDYGMSSSPHVLR |
| | NRAQSGSVPQFKKVVFQEFTDGSFTQPLYRGELNEHLGLLGPYIRAEVEDNIMVTFRNQASRP |
| | YSFYSSLISYEEDQRQGAEPRKNFVKPNETKTYFWKVQHHMAPTKDEFDCKAWAYFSDVDLE |
| | KDVHSGLIGPLLVCHTNTLNPAHGRQVTVQEFALFFTIFDETKSWYFTENMERNCRAPCNIQM |
| | EDPTFKENYRFHAINGYIMDTLPGLVMAQDQRIRWYLLSMGSNENIHSIHFSGHVFTVRKKEE |
| | YKMALYNLYPGVFETVEMLPSKAGIWRVECLIGEHLHAGMSTLFLVYSNKCQTPLGMASGHI |
| | RDFQITASGQYGQWAPKLARLHYSGSINAWSTKEPFSWIKVDLLAPMIIHGIKTQGARQKFSSL |
| | YISQFIIMYSLDGKKWQTYRGNSTGTLMVFFGNVDSSGIKHNIFNPPIIARYIRLHPTHYSIRSTL |
| | RMELMGCDLNSCSMPLGMESKAISDAQITASSYFTNMFATWSPSKARLHLQGRSNAWRPQVN |
| | NPKEWLQVDFQKTMKVTGVTTQGVKSLLTSMYVKEFLISSSQDGHQWTLFFQNGKVKVFQG |
| | NQDSFTPVVNSLDPPLLTRYLRIHPQSWVHQIALRMEVLGCEAQDLY |
| AG864- | GASPGTSSTGSPGSSPSASTGTGPGSSPSASTGTGPGTPGSGTASSSPGSSTPSGATGSPGSNPSAS |
| FVIII | TGTGPGASPGTSSTGSPGTPGSGTASSSPGSSTPSGATGSPGTPGSGTASSSPGASPGTSSTGSPG |
| | ASPGTSSTGSPGTPGSGTASSSPGSSTPSGATGSPGASPGTSSTGSPGTPGSGTASSSPGSSTPSGA |
| | TGSPGSNPSASTGTGPGSSPSASTGTGPGSSTPSGATGSPGSSTPSGATGSPGASPGTSSTGSPGA |
| | SPGTSSTGSPGASPGTSSTGSPGTPGSGTASSSPGASPGTSSTGSPGASPGTSSTGSPGASPGTSST |
| | GSPGSSPSASTGTGPGTPGSGTASSSPGASPGTSSTGSPGASPGTSSTGSPGASPGTSSTGSPGSST |
| | PSGATGSPGSSTPSGATGSPGASPGTSSTGSPGTPGSGTASSSPGSSTPSGATGSPGSSTPSGATG |
| | SPGSSTPSGATGSPGSSPSASTGTGPGASPGTSSTGSPGASPGTSSTGSPGTPGSGTASSSPGASPG |
| | TSSTGSPGASPGTSSTGSPGASPGTSSTGSPGASPGTSSTGSPGTPGSGTASSSPGSSTPSGATGSP |
| | GTPGSGTASSSPGSSTPSGATGSPGTPGSGTASSSPGSSTPSGATGSPGSSTPSGATGSPGSSPSAS |
| | TGTGPGSSPSASTGTGPGASPGTSSTGSPGTPGSGTASSSPGSSTPSGATGSPGSSPSASTGTGPG |
| | SSPSASTGTGPGASPGTSSTGSPGASPGTSSTGSPGSSTPSGATGSPGSSPSASTGTGPGASPGTSS |
| | TGSPGSSPSASTGTGPGTPGSGTASSSPGSSTPSGATGSPGSSTPSGATGSPGASPGTSSTGSPGA |
| | TRRYYLGAVELSWDYMQSDLGELPVDARFPPRVPKSFPFNTSVVYKKTLFVEFTDHLFNIAKP |
| | RPPWMGLLGPTIQAEVYDTVVITLKNMASHPVSLHAVGVSYWKASEGAEYDDQTSQREKED |
| | DKVFPGGSHTYVWQVLKENGPMASDPLCLTYSYLSHVDLVKDLNSGLIGALLVCREGSLAKE |
| | KTQTLHKFILLFAVFDEGKSWHSETKNSLMQDRDAASARAWPKMHTVNGYVNRSLPGLIGCH |
| | RKSVYWHVIGMGTTPEVHSIFLEGHTFLVRNHRQASLEISPITFLTAQTLLMDLGQFLLFCHISS |
| | HQHDGMEAYVKVDSCPEEPQLRMKNNEEAEDYDDDLTDSEMDVVRFDDDNSPSFIQIRSVAK |
| | KHPKTWVHYIAAEEEDWDYAPLVLAPDDRSYKSQYLNNGPQRIGRKYKKVRFMAYTDETFK |
| | TREAIQHESGILGPLLYGEVGDTLLIIFKNQASRPYNIYPHGITDVRPLYSRRLPKGVKHLKDFPI |
| | LPGEIFKYKWTVTVEDGPTKSDPRCLTRYYSSFVNMERDLASGLIGPLLICYKESVDQRGNQIM |
| | SDKRNVILFSVFDENRSWYLTENIQRFLPNPAGVQLEDPEFQASNIMHSINGYVFDSLQLSVCL |
| | HEVAYWYILSIGAQTDFLSVFFSGYTFKHKMVYEDTLTLFPFSGETVFMSMENPGLWILGCHN |
| | SDFRNRGMTALLKVSSCDKNTGDYYEDSYEDISAYLLSKNNAIEPRSFSQNSRHPSTRQKQFN |
| | ATTIPENDIEKTDPWFAHRTPMPKIQNVSSSDLLMLLRQSPTPHGLSLSDLQEAKYETFSDDPSP |
| | GAIDSNNSLSEMTHFRPQLHHSGDMVFTPESGLQLRLNEKLGTTAATELKKLDFKVSSTSNNLI |
| | STIPSDNLAAGTDNTSSLGPPSMPVHYDSQLDTTLFGKKSSPLTESGGPLSLSEENNDSKLLESG |
| | LMNSQESSWGKNVSSTESGRLFKGKRAHGPALLTKDNALFKVSISLLKTNKTSNNSATNRKTH |
| | IDGPSLLIENSPSVWQNILESDTEFKKVTPLIHDRMLMDKNATALRLNHMSNKTTSSKNMEMV |
| | QQKKEGPIPPDAQNPDMSFFKMLFLPESARWIQRTHGKNSLNSGQGPSPKQLVSLGPEKSVEG |
| | QNFLSEKNKVVVGKGEFTKDVGLKEMVFPSSRNLFLTNLDNLHENNTHNQEKKIQEEIEKKET |
| | LIQENVVLPQIHTVTGTKNFMKNLFLLSTRQNVEGSYDGAYAPVLQDFRSLNDSTNRTKKHTA |
| | HFSKKGEEENLEGLGNQTKQIVEKYACTTRISPNTSQQNFVTQRSKRALKQFRLPLEETELEKRI |
| | IVDDTSTQWSKNMKHLTPSTLTQIDYNEKEKGAITQSPLSDCLTRSHSIPQANRSPLPIAKVSSFP |
| | SIRPIYLTRVLFQDNSSHLPAASYRKKDSGVQESSHFLQGAKKNNLSLAILTLEMTGDQREVGS |
| | LGTSATNSVTYKKVENTVLPKPDLPKTSGKVELLPKVHIYQKDLFPTETSNGSPGHLDLVEGSL |
| | LQGTEGAIKWNEANRPGKVPFLRVATESSAKTPSKLLDPLAWDNHYGTQIPKEEWKSQEKSPE |
| | KTAFKKKDTILSLNACESNHAIAAINEGQNKPEIEVTWAKQGRTERLCSQNPPVLKRHQREITR |
| | TTLQSDQEEIDYDDTISVEMKKEDFDIYDEDENQSPRSFQKKTRHYFIAAVERLWDYGMSSSPH |
| | VLRNRAQSGSVPQFKKVVFQEFTDGSFTQPLYRGELNEHLGLLGPYIRAEVEDNIMVTFRNQA |
| | SRPYSFYSSLISYEEDQRQGAEPRKNFVKPNETKTYFWKVQHHMAPTKDEFDCKAWAYFSDV |
| | DLEKDVHSGLIGPLLVCHTNTLNPAHGRQVTVQEFALFFTIFDETKSWYFTENMERNCRAPCNI |
| | QMEDPTFKENYRFHAINGYIMDTLPGLVMAQDQRIRWYLLSMGSNENIHSIHFSGHVFTVRKK |
| | EEYKMALYNLYPGVFETVEMLPSKAGIWRVECLIGEHLHAGMSTLFLVYSNKCQTPLGMASG |
| | HIRDFQITASGQYGQWAPKLARLHYSGSINAWSTKEPFSWIKVDLLAPMIIHGIKTQGARQKFS |
| | SLYISQFIIMYSLDGKKWQTYRGNSTGTLMVFFGNVDSSGIKHNIFNPPIIARYIRLHPTHYSIRS |
| | TLRMELMGCDLNSCSMPLGMESKAISDAQITASSYFTNMFATWSPSKARLHLQGRSNAWRPQ |
| | VNNPKEWLQVDFQKTMKVTGVTTQGVKSLLTSMYVKEFLISSSQDGHQWTLFFQNGKVKVF |
| | QGNQDSFTPVVNSLDPPLLTRYLRIHPQSWVHQIALRMEVLGCEAQDLY |
| AM875- | GTSTEPSEGSAPGSEPATSGSETPGSPAGSPTSTEEGSTSSTAESPGPGTSTPESGSASPGSTSESPS |
| FVIII | GTAPGSTSESPSGTAPGTSTPESGSASPGTSTPESGSASPGSEPATSGSETPGTSESATPESGPGSP |
| | AGSPTSTEEGTSTEPSEGSAPGTSESATPESGPGTSTEPSEGSAPGTSTEPSEGSAPGSPAGSPTST |
| | EEGTSTEPSEGSAPGTSTEPSEGSAPGTSESATPESGPGTSESATPESGPGTSTEPSEGSAPGTSTE |
| | PSEGSAPGTSESATPESGPGTSTEPSEGSAPGSEPATSGSETPGSPAGSPTSTEEGSSTPSGATGSP |
| | GTPGSGTASSSPGSSTPSGATGSPGTSTEPSEGSAPGTSTEPSEGSAPGSEPATSGSETPGSPAGSP |
| | TSTEEGSPAGSPTSTEEGTSTEPSEGSAPGASASGAPSTGGTSESATPESGPGSPAGSPTSTEEGSP |
| | AGSPTSTEEGSTSSTAESPGPGSTSESPSGTAPGTSPSGESSTAPGTPGSGTASSSPGSSTPSGATG |
| | SPGSSPSASTGTGPGSEPATSGSETPGTSESATPESGPGSEPATSGSETPGSTSSTAESPGPGSTSS |
| | TAESPGPGTSPSGESSTAPGSEPATSGSETPGSEPATSGSETPGTSTEPSEGSAPGSTSSTAESPGP |
| | GTSTPESGSASPGSTSESPSGTAPGTSTEPSEGSAPGTSTEPSEGSAPGTSTEPSEGSAPGSSTPSG |
| | ATGSPGSSPSASTGTGPGASPGTSSTGSPGSEPATSGSETPGTSESATPESGPGSPAGSPTSTEEGS |
| | STPSGATGSPGSSPSASTGTGPGASPGTSSTGSPGTSESATPESGPGTSTEPSEGSAPGTSTEPSEG |
| | SAPGATRRYYLGAVELSWDYMQSDLGELPVDARFPPRVPKSFPFNTSVVYKKTLFVEFTDHLF |
| | NIAKPRPPWMGLLGPTIQAEVYDTVVITLKNMASHPVSLHAVGVSYWKASEGAEYDDQTSQR |
| | EKEDDKVFPGGSHTYVWQVLKENGPMASDPLCLTYSYLSHVDLVKDLNSGLIGALLVCREGS |
| | LAKEKTQTLHKFILLFAVFDEGKSWHSETKNSLMQDRDAASARAWPKMHTVNGYVNRSLPG |
| | LIGCHRKSVYWHVIGMGTTPEVHSIFLEGHTFLVRNHRQASLEISPITFLTAQTLLMDLGQFLLF |
| | CHISSHQHDGMEAYVKVDSCPEEPQLRMKNNEEAEDYDDDLTDSEMDVVRFDDDNSPSFIQIR |
| | SVAKKHPKTWVHYIAAEEEDWDYAPLVLAPDDRSYKSQYLNNGPQRIGRKYKKVRFMAYTD |
| | ETFKTREAIQHESGILGPLLYGEVGDTLLIIFKNQASRPYNIYPHGITDVRPLYSRRLPKGVKHLK |
| | DFPILPGEIFKYKWTVTVEDGPTKSDPRCLTRYYSSFVNMERDLASGLIGPLLICYKESVDQRG |
| | NQIMSDKRNVILFSVFDENRSWYLTENIQRFLPNPAGVQLEDPEFQASNIMHSINGYVFDSLQL |
| | SVCLHEVAYWYILSIGAQTDFLSVFFSGYTFKHKMVYEDTLTLFPFSGETVFMSMENPGLWILG |
| | CHNSDFRNRGMTALLKVSSCDKNTGDYYEDSYEDISAYLLSKNNAIEPRSFSQNSRHPSTRQK |
| | QFNATTIPENDIEKTDPWFAHRTPMPKIQNVSSSDLLMLLRQSPTPHGLSLSDLQEAKYETFSDD |
| | PSPGAIDSNNSLSEMTHFRPQLHHSGDMVFTPESGLQLRLNEKLGTTAATELKKLDFKVSSTSN |
| | NLISTIPSDNLAAGTDNTSSLGPPSMPVHYDSQLDTTLFGKKSSPLTESGGPLSLSEENNDSKLL |
| | ESGLMNSQESSWGKNVSSTESGRLFKGKRAHGPALLTKDNALFKVSISLLKTNKTSNNSATNR |
| | KTHIDGPSLLIENSPSVWQNILESDTEFKKVTPLIHDRMLMDKNATALRLNHMSNKTTSSKNM |
| | EMVQQKKEGPIPPDAQNPDMSFFKMLFLPESARWIQRTHGKNSLNSGQGPSPKQLVSLGPEKS |
| | VEGQNFLSEKNKVVVGKGEFTKDVGLKEMVFPSSRNLFLTNLDNLHENNTHNQEKKIQEEIEK |
| | KETLIQENVVLPQIHTVTGTKNFMKNLFLLSTRQNVEGSYDGAYAPVLQDFRSLNDSTNRTKK |
| | HTAHFSKKGEEENLEGLGNQTKQIVEKYACTTRISPNTSQQNFVTQRSKRALKQFRLPLEETEL |
| | EKRIIVDDTSTQWSKNMKHLTPSTLTQIDYNEKEKGAITQSPLSDCLTRSHSIPQANRSPLPIAKV |
| | SSFPSIRPIYLTRVLFQDNSSHLPAASYRKKDSGVQESSHFLQGAKKNNLSLAILTLEMTGDQRE |
| | VGSLGTSATNSVTYKKVENTVLPKPDLPKTSGKVELLPKVHIYQKDLFPTETSNGSPGHLDLVE |
| | GSLLQGTEGAIKWNEANRPGKVPFLRVATESSAKTPSKLLDPLAWDNHYGTQIPKEEWKSQEK |
| | SPEKTAFKKKDTILSLNACESNHAIAAINEGQNKPEIEVTWAKQGRTERLCSQNPPVLKRHQRE |
| | ITRTTLQSDQEEIDYDDTISVEMKKEDFDIYDEDENQSPRSFQKKTRHYFIAAVERLWDYGMSS |
| | SPHVLRNRAQSGSVPQFKKVVFQEFTDGSFTQPLYRGELNEHLGLLGPYIRAEVEDNIMVTFRN |
| | QASRPYSFYSSLISYEEDQRQGAEPRKNFVKPNETKTYFWKVQHHMAPTKDEFDCKAWAYFS |
| | DVDLEKDVHSGLIGPLLVCHTNTLNPAHGRQVTVQEFALFFTIFDETKSWYFTENMERNCRAP |
| | CNIQMEDPTFKENYRFHAINGYIMDTLPGLVMAQDQRIRWYLLSMGSNENIHSIHFSGHVFTV |
| | RKKEEYKMALYNLYPGVFETVEMLPSKAGIWRVECLIGEHLHAGMSTLFLVYSNKCQTPLGM |
| | ASGHIRDFQITASGQYGQWAPKLARLHYSGSINAWSTKEPFSWIKVDLLAPMIIHGIKTQGARQ |
| | KFSSLYISQFIIMYSLDGKKWQTYRGNSTGTLMVFFGNVDSSGIKHNIFNPPIIARYIRLHPTHYS |
| | IRSTLRMELMGCDLNSCSMPLGMESKAISDAQITASSYFTNMFATWSPSKARLHLQGRSNAWR |
| | PQVNNPKEWLQVDFQKTMKVTGVTTQGVKSLLTSMYVKEFLISSSQDGHQWTLFFQNGKVK |
| | VFQGNQDSFTPVVNSLDPPLLTRYLRIHPQSWVHQIALRMEVLGCEAQDLY |
| FVIII | ATRRYYLGAVELSWDYMQSDLGELPVDARFPPRVPKSFPFNTSVVYKKTLFVEFTVHLFNIAK |
| BDD2- | PRPPWMGLLGPTIQAEVYDTVVITLKNMASHPVSLHAVGVSYWKASEGAEYDDQTSQREKED |
| AE864 | DKVFPGGSHTYVWQVLKENGPMASDPLCLTYSYLSHVDLVKDLNSGLIGALLVCREGSLAKE |
| | KTQTLHKFILLFAVFDEGKSWHSETKNSLMQDRDAASARAWPKMHTVNGYVNRSLPGLIGCH |
| | RKSVYWHVIGMGTTPEVHSIFLEGHTFLVRNHRQASLEISPITFLTAQTLLMDLGQFLLFCHISS |
| | HQHDGMEAYVKVDSCPEEPQLRMKNNEEAEDYDDDLTDSEMDVVRFDDDNSPSFIQIRSVAK |
| | KHPKTWVHYIAAEEEDWDYAPLVLAPDDRSYKSQYLNNGPQRIGRKYKKVRFMAYTDETFK |
| | TREAIQHESGILGPLLYGEVGDTLLIIFKNQASRPYNIYPHGITDVRPLYSRRLPKGVKHLKDFPI |
| | LPGEIFKYKWTVTVEDGPTKSDPRCLTRYYSSFVNMERDLASGLIGPLLICYKESVDQRGNQIM |
| | SDKRNVILFSVFDENRSWYLTENIQRFLPNPAGVQLEDPEFQASNIMHSINGYVFDSLQLSVCL |
| | HEVAYWYILSIGAQTDFLSVFFSGYTFKHKMVYEDTLTLFPFSGETVFMSMENPGLWILGCHN |
| | SDFRNRGMTALLKVSSCDKNTGDYYEDSYEDISAYLLSKNNAIEPRSFSQNPPVLKRHQREITR |
| | TTLQSDQEEIDYDDTISVEMKKEDFDIYDEDENQSPRSFQKKTRHYFIAAVERLWDYGMSSSPH |
| | VLRNRAQSGSVPQFKKVVFQEFTDGSFTQPLYRGELNEHLGLLGPYIRAEVEDNIMVTFRNQA |
| | SRPYSFYSSLISYEEDQRQGAEPRKNFVKPNETKTYFWKVQHHMAPTKDEFDCKAWAYFSDV |
| | DLEKDVHSGLIGPLLVCHTNTLNPAHGRQVTVQEFALFFTIFDETKSWYFTENMERNCRAPCNI |
| | QMEDPTFKENYRFHAINGYIMDTLPGLVMAQDQRIRWYLLSMGSNENIHSIHFSGHVFTVRKK |
| | EEYKMALYNLYPGVFETVEMLPSKAGIWRVECLIGEHLHAGMSTLFLVYSNKCQTPLGMASG |
| | HIRDFQITASGQYGQWAPKLARLHYSGSINAWSTKEPFSWIKVDLLAPMIIHGIKTQGARQKFS |
| | SLYISQFIIMYSLDGKKWQTYRGNSTGTLMVFFGNVDSSGIKHNIFNPPIIARYIRLHPTHYSIRS |
| | TLRMELMGCDLNSCSMPLGMESKAISDAQITASSYFTNMFATWSPSKARLHLQGRSNAWRPQ |
| | VNNPKEWLQVDFQKTMKVTGVTTQGVKSLLTSMYVKEFLISSSQDGHQWTLFFQNGKVKVF |
| | QGNQDSFTPVVNSLDPPLLTRYLRIHPQSWVHQIALRMEVLGCEAQDLYGGSPAGSPTSTEEGT |
| | SESATPESGPGTSTEPSEGSAPGSPAGSPTSTEEGTSTEPSEGSAPGTSTEPSEGSAPGTSESATPE |
| | SGPGSEPATSGSETPGSEPATSGSETPGSPAGSPTSTEEGTSESATPESGPGTSTEPSEGSAPGTST |
| | EPSEGSAPGSPAGSPTSTEEGTSTEPSEGSAPGTSTEPSEGSAPGTSESATPESGPGTSTEPSEGSA |
| | PGTSESATPESGPGSEPATSGSETPGTSTEPSEGSAPGTSTEPSEGSAPGTSESATPESGPGTSESA |
| | TPESGPGSPAGSPTSTEEGTSESATPESGPGSEPATSGSETPGTSESATPESGPGTSTEPSEGSAPG |
| | TSTEPSEGSAPGTSTEPSEGSAPGTSTEPSEGSAPGTSTEPSEGSAPGTSTEPSEGSAPGSPAGSPT |
| | STEEGTSTEPSEGSAPGTSESATPESGPGSEPATSGSETPGTSESATPESGPGSEPATSGSETPGTS |
| | ESATPESGPGTSTEPSEGSAPGTSESATPESGPGSPAGSPTSTEEGSPAGSPTSTEEGSPAGSPTST |
| | EEGTSESATPESGPGTSTEPSEGSAPGTSESATPESGPGSEPATSGSETPGTSESATPESGPGSEPA |
| | TSGSETPGTSESATPESGPGTSTEPSEGSAPGSPAGSPTSTEEGTSESATPESGPGSEPATSGSETP |
| | GTSESATPESGPGSPAGSPTSTEEGSPAGSPTSTEEGTSTEPSEGSAPGTSESATPESGPGTSESAT |
| | PESGPGTSESATPESGPGSEPATSGSETPGSEPATSGSETPGSPAGSPTSTEEGTSTEPSEGSAPGT |
| | STEPSEGSAPGSEPATSGSETPGTSESATPESGPGTSTEPSEGSAP |
| FVIII | ATRRYYLGAVELSWDYMQSDLGELPVDARFPPRVPKSFPFNTSVVYKKTLFVEFTVHLFNIAK |
| BDD2- | PRPPWMGLLGPTIQAEVYDTVVITLKNMASHPVSLHAVGVSYWKASEGAEYDDQTSQREKED |
| AG864 | DKVFPGGSHTYVWQVLKENGPMASDPLCLTYSYLSHVDLVKDLNSGLIGALLVCREGSLAKE |
| | KTQTLHKFILLFAVFDEGKSWHSETKNSLMQDRDAASARAWPKMHTVNGYVNRSLPGLIGCH |
| | RKSVYWHVIGMGTTPEVHSIFLEGHTFLVRNHRQASLEISPITFLTAQTLLMDLGQFLLFCHISS |
| | HQHDGMEAYVKVDSCPEEPQLRMKNNEEAEDYDDDLTDSEMDVVRFDDDNSPSFIQIRSVAK |
| | KHPKTWVHYIAAEEEDWDYAPLVLAPDDRSYKSQYLNNGPQRIGRKYKKVRFMAYTDETFK |
| | TREAIQHESGILGPLLYGEVGDTLLIIFKNQASRPYNIYPHGITDVRPLYSRRLPKGVKHLKDFPI |
| | LPGEIFKYKWTVTVEDGPTKSDPRCLTRYYSSFVNMERDLASGLIGPLLICYKESVDQRGNQIM |
| | SDKRNVILFSVFDENRSWYLTENIQRFLPNPAGVQLEDPEFQASNIMHSINGYVFDSLQLSVCL |
| | HEVAYWYILSIGAQTDFLSVFFSGYTFKHKMVYEDTLTLFPFSGETVFMSMENPGLWILGCHN |
| | SDFRNRGMTALLKVSSCDKNTGDYYEDSYEDISAYLLSKNNAIEPRSFSQNPPVLKRHQREITR |
| | TTLQSDQEEIDYDDTISVEMKKEDFDIYDEDENQSPRSFQKKTRHYFIAAVERLWDYGMSSSPH |
| | VLRNRAQSGSVPQFKKVVFQEFTDGSFTQPLYRGELNEHLGLLGPYIRAEVEDNIMVTFRNQA |
| | SRPYSFYSSLISYEEDQRQGAEPRKNFVKPNETKTYFWKVQHHMAPTKDEFDCKAWAYFSDV |
| | DLEKDVHSGLIGPLLVCHTNTLNPAHGRQVTVQEFALFFTIFDETKSWYFTENMERNCRAPCNI |
| | QMEDPTFKENYRFHAINGYIMDTLPGLVMAQDQRIRWYLLSMGSNENIHSIHFSGHVFTVRKK |
| | EEYKMALYNLYPGVFETVEMLPSKAGIWRVECLIGEHLHAGMSTLFLVYSNKCQTPLGMASG |
| | HIRDFQITASGQYGQWAPKLARLHYSGSINAWSTKEPFSWIKVDLLAPMIIHGIKTQGARQKFS |
| | SLYISQFIIMYSLDGKKWQTYRGNSTGTLMVFFGNVDSSGIKHNIFNPPIIARYIRLHPTHYSIRS |
| | TLRMELMGCDLNSCSMPLGMESKAISDAQITASSYFTNMFATWSPSKARLHLQGRSNAWRPQ |
| | VNNPKEWLQVDFQKTMKVTGVTTQGVKSLLTSMYVKEFLISSSQDGHQWTLFFQNGKVKVF |
| | QGNQDSFTPVVNSLDPPLLTRYLRIHPQSWVHQIALRMEVLGCEAQDLYGGASPGTSSTGSPG |
| | SSPSASTGTGPGSSPSASTGTGPGTPGSGTASSSPGSSTPSGATGSPGSNPSASTGTGPGASPGTS |
| | STGSPGTPGSGTASSSPGSSTPSGATGSPGTPGSGTASSSPGASPGTSSTGSPGASPGTSSTGSPGT |
| | PGSGTASSSPGSSTPSGATGSPGASPGTSSTGSPGTPGSGTASSSPGSSTPSGATGSPGSNPSASTG |
| | TGPGSSPSASTGTGPGSSTPSGATGSPGSSTPSGATGSPGASPGTSSTGSPGASPGTSSTGSPGAS |
| | PGTSSTGSPGTPGSGTASSSPGASPGTSSTGSPGASPGTSSTGSPGASPGTSSTGSPGSSPSASTGT |
| | GPGTPGSGTASSSPGASPGTSSTGSPGASPGTSSTGSPGASPGTSSTGSPGSSTPSGATGSPGSSTP |
| | SGATGSPGASPGTSSTGSPGTPGSGTASSSPGSSTPSGATGSPGSSTPSGATGSPGSSTPSGATGS |
| | PGSSPSASTGTGPGASPGTSSTGSPGASPGTSSTGSPGTPGSGTASSSPGASPGTSSTGSPGASPG |
| | TSSTGSPGASPGTSSTGSPGASPGTSSTGSPGTPGSGTASSSPGSSTPSGATGSPGTPGSGTASSSP |
| | GSSTPSGATGSPGTPGSGTASSSPGSSTPSGATGSPGSSTPSGATGSPGSSPSASTGTGPGSSPSAS |
| | TGTGPGASPGTSSTGSPGTPGSGTASSSPGSSTPSGATGSPGSSPSASTGTGPGSSPSASTGTGPG |
| | ASPGTSSTGSPGASPGTSSTGSPGSSTPSGATGSPGSSPSASTGTGPGASPGTSSTGSPGSSPSAST |
| | GTGPGTPGSGTASSSPGSSTPSGATGSPGSSTPSGATGSPGASPGTSSTGSP |
| FVIII | ATRRYYLGAVELSWDYMQSDLGELPVDARFPPRVPKSFPFNTSVVYKKTLFVEFTVHLFNIAK |
| BDD3- | PRPPWMGLLGPTIQAEVYDTVVITLKNMASHPVSLHAVGVSYWKASEGAEYDDQTSQREKED |
| AE576 | DKVFPGGSHTYVWQVLKENGPMASDPLCLTYSYLSHVDLVKDLNSGLIGALLVCREGSLAKE |
| | KTQTLHKFILLFAVFDEGKSWHSETKNSLMQDRDAASARAWPKMHTVNGYVNRSLPGLIGCH |
| | RKSVYWHVIGMGTTPEVHSIFLEGHTFLVRNHRQASLEISPITFLTAQTLLMDLGQFLLFCHISS |
| | HQHDGMEAYVKVDSCPEEPQLRMKNNEEAEDYDDDLTDSEMDVVRFDDDNSPSFIQIRSVAK |
| | KHPKTWVHYIAAEEEDWDYAPLVLAPDDRSYKSQYLNNGPQRIGRKYKKVRFMAYTDETFK |
| | TREAIQHESGILGPLLYGEVGDTLLIIFKNQASRPYNIYPHGITDVRPLYSRRLPKGVKHLKDFPI |
| | LPGEIFKYKWTVTVEDGPTKSDPRCLTRYYSSFVNMERDLASGLIGPLLICYKESVDQRGNQIM |
| | SDKRNVILFSVFDENRSWYLTENIQRFLPNPAGVQLEDPEFQASNIMHSINGYVFDSLQLSVCL |
| | HEVAYWYILSIGAQTDFLSVFFSGYTFKHKMVYEDTLTLFPFSGETVFMSMENPGLWILGCHN |
| | SDFRNRGMTALLKVSSCDKNTGDYYEDSYEDISAYLLSKNNAIEPRSFSQNPPVLKRHQGEITR |
| | TTLQSDQEEIDYDDTISVEMKKEDFDIYDEDENQSPRSFQKKTRHYFIAAVERLWDYGMSSSPH |
| | VLRNRAQSGSVPQFKKVVFQEFTDGSFTQPLYRGELNEHLGLLGPYIRAEVEDNIMVTFRNQA |
| | SRPYSFYSSLISYEEDQRQGAEPRKNFVKPNETKTYFWKVQHHMAPTKDEFDCKAWAYFSDV |
| | DLEKDVHSGLIGPLLVCHTNTLNPAHGRQVTVQEFALFFTIFDETKSWYFTENMERNCRAPCNI |
| | QMEDPTFKENYRFHAINGYIMDTLPGLVMAQDQRIRWYLLSMGSNENIHSIHFSGHVFTVRKK |
| | EEYKMALYNLYPGVFETVEMLPSKAGIWRVECLIGEHLHAGMSTLFLVYSNKCQTPLGMASG |
| | HIRDFQITASGQYGQWAPKLARLHYSGSINAWSTKEPFSWIKVDLLAPMIIHGIKTQGARQKFS |
| | SLYISQFIIMYSLDGKKWQTYRGNSTGTLMVFFGNVDSSGIKHNIFNPPIIARYIRLHPTHYSIRS |
| | TLRMELMGCDLNSCSMPLGMESKAISDAQITASSYFTNMFATWSPSKARLHLQGRSNAWRPQ |
| | VNNPKEWLQVDFQKTMKVTGVTTQGVKSLLTSMYVKEFLISSSQDGHQWTLFFQNGKVKVF |
| | QGNQDSFTPVVNSLDPPLLTRYLRIHPQSWVHQIALRMEVLGCEAQDLYGGSPAGSPTSTEEGT |
| | SESATPESGPGTSTEPSEGSAPGSPAGSPTSTEEGTSTEPSEGSAPGTSTEPSEGSAPGTSESATPE |
| | SGPGSEPATSGSETPGSEPATSGSETPGSPAGSPTSTEEGTSESATPESGPGTSTEPSEGSAPGTST |
| | EPSEGSAPGSPAGSPTSTEEGTSTEPSEGSAPGTSTEPSEGSAPGTSESATPESGPGTSTEPSEGSA |
| | PGTSESATPESGPGSEPATSGSETPGTSTEPSEGSAPGTSTEPSEGSAPGTSESATPESGPGTSESA |
| | TPESGPGSPAGSPTSTEEGTSESATPESGPGSEPATSGSETPGTSESATPESGPGTSTEPSEGSAPG |
| | TSTEPSEGSAPGTSTEPSEGSAPGTSTEPSEGSAPGTSTEPSEGSAPGTSTEPSEGSAPGSPAGSPT |
| | STEEGTSTEPSEGSAPGTSESATPESGPGSEPATSGSETPGTSESATPESGPGSEPATSGSETPGTS |
| | ESATPESGPGTSTEPSEGSAPGTSESATPESGPGSPAGSPTSTEEGSPAGSPTSTEEGSPAGSPTST |
| | EEGTSESATPESGPGTSTEPSEGSAP |
| FVIII | ATRRYYLGAVELSWDYMQSDLGELPVDARFPPRVPKSFPFNTSVVYKKTLFVEFTVHLFNIAK |
| BDD4- | PRPPWMGLLGPTIQAEVYDTVVITLKNMASHPVSLHAVGVSYWKASEGAEYDDQTSQREKED |
| AE864 | DKVFPGGSHTYVWQVLKENGPMASDPLCLTYSYLSHVDLVKDLNSGLIGALLVCREGSLAKE |
| | KTQTLHKFILLFAVFDEGKSWHSETKNSLMQDRDAASARAWPKMHTVNGYVNRSLPGLIGCH |
| | RKSVYWHVIGMGTTPEVHSIFLEGHTFLVRNHRQASLEISPITFLTAQTLLMDLGQFLLFCHISS |
| | HQHDGMEAYVKVDSCPEEPQLRMKNNEEAEDYDDDLTDSEMDVVRFDDDNSPSFIQIRSVAK |
| | KHPKTWVHYIAAEEEDWDYAPLVLAPDDRSYKSQYLNNGPQRIGRKYKKVRFMAYTDETFK |
| | TREAIQHESGILGPLLYGEVGDTLLIIFKNQASRPYNIYPHGITDVRPLYSRRLPKGVKHLKDFPI |
| | LPGEIFKYKWTVTVEDGPTKSDPRCLTRYYSSFVNMERDLASGLIGPLLICYKESVDQRGNQIM |
| | SDKRNVILFSVFDENRSWYLTENIQRFLPNPAGVQLEDPEFQASNIMHSINGYVFDSLQLSVCL |
| | HEVAYWYILSIGAQTDFLSVFFSGYTFKHKMVYEDTLTLFPFSGETVFMSMENPGLWILGCHN |
| | SDFRNRGMTALLKVSSCDKNTGDYYEDSYEDISAYLLSKNNAIEPRSFSQQSPRSFQKKTRHYF |
| | IAAVERLWDYGMSSSPHVLRNRAQSGSVPQFKKVVFQEFTDGSFTQPLYRGELNEHLGLLGPY |
| | IRAEVEDNIMVTFRNQASRPYSFYSSLISYEEDQRQGAEPRKNFVKPNETKTYFWKVQHHMAP |
| | TKDEFDCKAWAYFSDVDLEKDVHSGLIGPLLVCHTNTLNPAHGRQVTVQEFALFFTIFDETKS |
| | WYFTENMERNCRAPCNIQMEDPTFKENYRFHAINGYIMDTLPGLVMAQDQRIRWYLLSMGSN |
| | ENIHSIHFSGHVFTVRKKEEYKMALYNLYPGVFETVEMLPSKAGIWRVECLIGEHLHAGMSTL |
| | FLVYSNKCQTPLGMASGHIRDFQITASGQYGQWAPKLARLHYSGSINAWSTKEPFSWIKVDLL |
| | APMIIHGIKTQGARQKFSSLYISQFIIMYSLDGKKWQTYRGNSTGTLMVFFGNVDSSGIKHNIFN |
| | PPIIARYIRLHPTHYSIRSTLRMELMGCDLNSCSMPLGMESKAISDAQITASSYFTNMFATWSPS |
| | KARLHLQGRSNAWRPQVNNPKEWLQVDFQKTMKVTGVTTQGVKSLLTSMYVKEFLISSSQD |
| | GHQWTLFFQNGKVKVFQGNQDSFTPVVNSLDPPLLTRYLRIHPQSWVHQIALRMEVLGCEAQ |
| | DLYGGSPAGSPTSTEEGTSESATPESGPGTSTEPSEGSAPGSPAGSPTSTEEGTSTEPSEGSAPGTS |
| | TEPSEGSAPGTSESATPESGPGSEPATSGSETPGSEPATSGSETPGSPAGSPTSTEEGTSESATPES |
| | GPGTSTEPSEGSAPGTSTEPSEGSAPGSPAGSPTSTEEGTSTEPSEGSAPGTSTEPSEGSAPGTSES |
| | ATPESGPGTSTEPSEGSAPGTSESATPESGPGSEPATSGSETPGTSTEPSEGSAPGTSTEPSEGSAP |
| | GTSESATPESGPGTSESATPESGPGSPAGSPTSTEEGTSESATPESGPGSEPATSGSETPGTSESAT |
| | PESGPGTSTEPSEGSAPGTSTEPSEGSAPGTSTEPSEGSAPGTSTEPSEGSAPGTSTEPSEGSAPGT |
| | STEPSEGSAPGSPAGSPTSTEEGTSTEPSEGSAPGTSESATPESGPGSEPATSGSETPGTSESATPE |
| | SGPGSEPATSGSETPGTSESATPESGPGTSTEPSEGSAPGTSESATPESGPGSPAGSPTSTEEGSPA |
| | GSPTSTEEGSPAGSPTSTEEGTSESATPESGPGTSTEPSEGSAPGTSESATPESGPGSEPATSGSET |
| | PGTSESATPESGPGSEPATSGSETPGTSESATPESGPGTSTEPSEGSAPGSPAGSPTSTEEGTSESA |
| | TPESGPGSEPATSGSETPGTSESATPESGPGSPAGSPTSTEEGSPAGSPTSTEEGTSTEPSEGSAPG |
| | TSESATPESGPGTSESATPESGPGTSESATPESGPGSEPATSGSETPGSEPATSGSETPGSPAGSPT |
| | STEEGTSTEPSEGSAPGTSTEPSEGSAPGSEPATSGSETPGTSESATPESGPGTSTEPSEGSAP |
| AE912- | MAEPAGSPTSTEEGTPGSGTASSSPGSSTPSGATGSPGASPGTSSTGSPGSPAGSPTSTEEGTSES |
| FVIII | ATPESGPGTSTEPSEGSAPGSPAGSPTSTEEGTSTEPSEGSAPGTSTEPSEGSAPGTSESATPESGP |
| BDD9 | GSEPATSGSETPGSEPATSGSETPGSPAGSPTSTEEGTSESATPESGPGTSTEPSEGSAPGTSTEPS |
| | EGSAPGSPAGSPTSTEEGTSTEPSEGSAPGTSTEPSEGSAPGTSESATPESGPGTSTEPSEGSAPGT |
| | SESATPESGPGSEPATSGSETPGTSTEPSEGSAPGTSTEPSEGSAPGTSESATPESGPGTSESATPE |
| | SGPGSPAGSPTSTEEGTSESATPESGPGSEPATSGSETPGTSESATPESGPGTSTEPSEGSAPGTST |
| | EPSEGSAPGTSTEPSEGSAPGTSTEPSEGSAPGTSTEPSEGSAPGTSTEPSEGSAPGSPAGSPTSTE |
| | EGTSTEPSEGSAPGTSESATPESGPGSEPATSGSETPGTSESATPESGPGSEPATSGSETPGTSESA |
| | TPESGPGTSTEPSEGSAPGTSESATPESGPGSPAGSPTSTEEGSPAGSPTSTEEGSPAGSPTSTEEG |
| | TSESATPESGPGTSTEPSEGSAPGTSESATPESGPGSEPATSGSETPGTSESATPESGPGSEPATSG |
| | SETPGTSESATPESGPGTSTEPSEGSAPGSPAGSPTSTEEGTSESATPESGPGSEPATSGSETPGTS |
| | ESATPESGPGSPAGSPTSTEEGSPAGSPTSTEEGTSTEPSEGSAPGTSESATPESGPGTSESATPES |
| | GPGTSESATPESGPGSEPATSGSETPGSEPATSGSETPGSPAGSPTSTEEGTSTEPSEGSAPGTSTE |
| | PSEGSAPGSEPATSGSETPGTSESATPESGPGTSTEPSEGSAPGATRRYYLGAVELSWDYMQSD |
| | LGELPVDARFPPRVPKSFPFNTSVVYKKTLFVEFTDHLFNIAKPRPPWMGLLGPTIQAEVYDTV |
| | VITLKNMASHPVSLHAVGVSYWKASEGAEYDDQTSQREKEDDKVFPGGSHTYVWQVLKENG |
| | PMASDPLCLTYSYLSHVDLVKDLNSGLIGALLVCREGSLAKEKTQTLHKFILLFAVFDEGKSW |
| | HSETKNSLMQDRDAASARAWPKMHTVNGYVNRSLPGLIGCHRKSVYWHVIGMGTTPEVHSIF |
| | LEGHTFLVRNHRQASLEISPITFLTAQTLLMDLGQFLLFCHISSHQHDGMEAYVKVDSCPEEPQ |
| | LRMKNNEEAEDYDDDLTDSEMDVVRFDDDNSPSFIQIRSVAKKHPKTWVHYIAAEEEDWDYA |
| | PLVLAPDDRSYKSQYLNNGPQRIGRKYKKVRFMAYTDETFKTREAIQHESGILGPLLYGEVGD |
| | TLLIIFKNQASRPYNIYPHGITDVRPLYSRRLPKGVKHLKDFPILPGEIFKYKWTVTVEDGPTKS |
| | DPRCLTRYYSSFVNMERDLASGLIGPLLICYKESVDQRGNQIMSDKRNVILFSVFDENRSWYLT |
| | ENIQRFLPNPAGVQLEDPEFQASNIMHSINGYVFDSLQLSVCLHEVAYWYILSIGAQTDFLSVFF |
| | SGYTFKHKMVYEDTLTLFPFSGETVFMSMENPGLWILGCHNSDFRNRGMTALLKVSSCDKNT |
| | GDYYEDSYEDISAYLLSKNNAIEPRSFSQNPPVLKRHQREITRTTLQSDQEEIDYDDTISVEMKK |
| | EDFDIYDEDENQSPRSFQKKTRHYFIAAVERLWDYGMSSSPHVLRNRAQSGSVPQFKKVVFQE |
| | FTDGSFTQPLYRGELNEHLGLLGPYIRAEVEDNIMVTFRNQASRPYSFYSSLISYEEDQRQGAEP |
| | RKNFVKPNETKTYFWKVQHHMAPTKDEFDCKAWAYFSDVDLEKDVHSGLIGPLLVCHTNTL |
| | NPAHGRQVTVQEFALFFTIFDETKSWYFTENMERNCRAPCNIQMEDPTFKENYRFHAINGYIM |
| | DTLPGLVMAQDQRIRWYLLSMGSNENIHSIHFSGHVFTVRKKEEYKMALYNLYPGVFETVEM |
| | LPSKAGIWRVECLIGEHLHAGMSTLFLVYSNKCQTPLGMASGHIRDFQITASGQYGQWAPKLA |
| | RLHYSGSINAWSTKEPFSWIKVDLLAPMIIHGIKTQGARQKFSSLYISQFIIMYSLDGKKWQTYR |
| | GNSTGTLMVFFGNVDSSGIKHNIFNPPIIARYIRLHPTHYSIRSTLRMELMGCDLNSCSMPLGME |
| | SKAISDAQITASSYFTNMFATWSPSKARLHLQGRSNAWRPQVNNPKEWLQVDFQKTMKVTGV |
| | TTQGVKSLLTSMYVKEFLISSSQDGHQWTLFFQNGKVKVFQGNQDSFTPVVNSLDPPLLTRYL |
| | RIHPQSWVHQIALRMEVLGCEAQDLY |
| FVIII | ATRRYYLGAVELSWDYMQSDLGELPVDARFPPRVPKSFPFNTSVVYKKTLFVEFTDHLFNIAK |
| BDD9- | PRPPWMGLLGPTIQAEVYDTVVITLKNMASHPVSLHAVGVSYWKASEGAEYDDQTSQREKED |
| AE288 | DKVFPGGSHTYVWQVLKENGPMASDPLCLTYSYLSHVDLVKDLNSGLIGALLVCREGSLAKE |
| | KTQTLHKFILLFAVFDEGKSWHSETKNSLMQDRDAASARAWPKMHTVNGYVNRSLPGLIGCH |
| | RKSVYWHVIGMGTTPEVHSIFLEGHTFLVRNHRQASLEISPITFLTAQTLLMDLGQFLLFCHISS |
| | HQHDGMEAYVKVDSCPEEPQLRMKNNEEAEDYDDDLTDSEMDVVRFDDDNSPSFIQIRSVAK |
| | KHPKTWVHYIAAEEEDWDYAPLVLAPDDRSYKSQYLNNGPQRIGRKYKKVRFMAYTDETFK |
| | TREAIQHESGILGPLLYGEVGDTLLIIFKNQASRPYNIYPHGITDVRPLYSRRLPKGVKHLKDFPI |
| | LPGEIFKYKWTVTVEDGPTKSDPRCLTRYYSSFVNMERDLASGLIGPLLICYKESVDQRGNQIM |
| | SDKRNVILFSVFDENRSWYLTENIQRFLPNPAGVQLEDPEFQASNIMHSINGYVFDSLQLSVCL |
| | HEVAYWYILSIGAQTDFLSVFFSGYTFKHKMVYEDTLTLFPFSGETVFMSMENPGLWILGCHN |
| | SDFRNRGMTALLKVSSCDKNTGDYYEDSYEDISAYLLSKNNAIEPRSFSQNPPVLKRHQREITR |
| | TTLQSDQEEIDYDDTISVEMKKEDFDIYDEDENQSPRSFQKKTRHYFIAAVERLWDYGMSSSPH |
| | VLRNRAQSGSVPQFKKVVFQEFTDGSFTQPLYRGELNEHLGLLGPYIRAEVEDNIMVTFRNQA |
| | SRPYSFYSSLISYEEDQRQGAEPRKNFVKPNETKTYFWKVQHHMAPTKDEFDCKAWAYFSDV |
| | DLEKDVHSGLIGPLLVCHTNTLNPAHGRQVTVQEFALFFTIFDETKSWYFTENMERNCRAPCNI |
| | QMEDPTFKENYRFHAINGYIMDTLPGLVMAQDQRIRWYLLSMGSNENIHSIHFSGHVFTVRKK |
| | EEYKMALYNLYPGVFETVEMLPSKAGIWRVECLIGEHLHAGMSTLFLVYSNKCQTPLGMASG |
| | HIRDFQITASGQYGQWAPKLARLHYSGSINAWSTKEPFSWIKVDLLAPMIIHGIKTQGARQKFS |
| | SLYISQFIIMYSLDGKKWQTYRGNSTGTLMVFFGNVDSSGIKHNIFNPPIIARYIRLHPTHYSIRS |
| | TLRMELMGCDLNSCSMPLGMESKAISDAQITASSYFTNMFATWSPSKARLHLQGRSNAWRPQ |
| | VNNPKEWLQVDFQKTMKVTGVTTQGVKSLLTSMYVKEFLISSSQDGHQWTLFFQNGKVKVF |
| | QGNQDSFTPVVNSLDPPLLTRYLRIHPQSWVHQIALRMEVLGCEAQDLYGGTSESATPESGPGS |
| | EPATSGSETPGTSESATPESGPGSEPATSGSETPGTSESATPESGPGTSTEPSEGSAPGSPAGSPTS |
| | TEEGTSESATPESGPGSEPATSGSETPGTSESATPESGPGSPAGSPTSTEEGSPAGSPTSTEEGTST |
| | EPSEGSAPGTSESATPESGPGTSESATPESGPGTSESATPESGPGSEPATSGSETPGSEPATSGSET |
| | PGSPAGSPTSTEEGTSTEPSEGSAPGTSTEPSEGSAPGSEPATSGSETPGTSESATPESGPGTSTEP |
| | SEGSAP |
| FVIII | ATRRYYLGAVELSWDYMQSDLGELPVDARFPPRVPKSFPFNTSVVYKKTLFVEFTDHLFNIAK |
| BDD9- | PRPPWMGLLGPTIQAEVYDTVVITLKNMASHPVSLHAVGVSYWKASEGAEYDDQTSQREKED |
| AE864 | DKVFPGGSHTYVWQVLKENGPMASDPLCLTYSYLSHVDLVKDLNSGLIGALLVCREGSLAKE |
| | KTQTLHKFILLFAVFDEGKSWHSETKNSLMQDRDAASARAWPKMHTVNGYVNRSLPGLIGCH |
| | RKSVYWHVIGMGTTPEVHSIFLEGHTFLVRNHRQASLEISPITFLTAQTLLMDLGQFLLFCHISS |
| | HQHDGMEAYVKVDSCPEEPQLRMKNNEEAEDYDDDLTDSEMDVVRFDDDNSPSFIQIRSVAK |
| | KHPKTWVHYIAAEEEDWDYAPLVLAPDDRSYKSQYLNNGPQRIGRKYKKVRFMAYTDETFK |
| | TREAIQHESGILGPLLYGEVGDTLLIIFKNQASRPYNIYPHGITDVRPLYSRRLPKGVKHLKDFPI |
| | LPGEIFKYKWTVTVEDGPTKSDPRCLTRYYSSFVNMERDLASGLIGPLLICYKESVDQRGNQIM |
| | SDKRNVILFSVFDENRSWYLTENIQRFLPNPAGVQLEDPEFQASNIMHSINGYVFDSLQLSVCL |
| | HEVAYWYILSIGAQTDFLSVFFSGYTFKHKMVYEDTLTLFPFSGETVFMSMENPGLWILGCHN |
| | SDFRNRGMTALLKVSSCDKNTGDYYEDSYEDISAYLLSKNNAIEPRSFSQNPPVLKRHQREITR |
| | TTLQSDQEEIDYDDTISVEMKKEDFDIYDEDENQSPRSFQKKTRHYFIAAVERLWDYGMSSSPH |
| | VLRNRAQSGSVPQFKKVVFQEFTDGSFTQPLYRGELNEHLGLLGPYIRAEVEDNIMVTFRNQA |
| | SRPYSFYSSLISYEEDQRQGAEPRKNFVKPNETKTYFWKVQHHMAPTKDEFDCKAWAYFSDV |
| | DLEKDVHSGLIGPLLVCHTNTLNPAHGRQVTVQEFALFFTIFDETKSWYFTENMERNCRAPCNI |
| | QMEDPTFKENYRFHAINGYIMDTLPGLVMAQDQRIRWYLLSMGSNENIHSIHFSGHVFTVRKK |
| | EEYKMALYNLYPGVFETVEMLPSKAGIWRVECLIGEHLHAGMSTLFLVYSNKCQTPLGMASG |
| | HIRDFQITASGQYGQWAPKLARLHYSGSINAWSTKEPFSWIKVDLLAPMIIHGIKTQGARQKFS |
| | SLYISQFIIMYSLDGKKWQTYRGNSTGTLMVFFGNVDSSGIKHNIFNPPIIARYIRLHPTHYSIRS |
| | TLRMELMGCDLNSCSMPLGMESKAISDAQITASSYFTNMFATWSPSKARLHLQGRSNAWRPQ |
| | VNNPKEWLQVDFQKTMKVTGVTTQGVKSLLTSMYVKEFLISSSQDGHQWTLFFQNGKVKVF |
| | QGNQDSFTPVVNSLDPPLLTRYLRIHPQSWVHQIALRMEVLGCEAQDLYGGSPAGSPTSTEEGT |
| | SESATPESGPGTSTEPSEGSAPGSPAGSPTSTEEGTSTEPSEGSAPGTSTEPSEGSAPGTSESATPE |
| | SGPGSEPATSGSETPGSEPATSGSETPGSPAGSPTSTEEGTSESATPESGPGTSTEPSEGSAPGTST |
| | EPSEGSAPGSPAGSPTSTEEGTSTEPSEGSAPGTSTEPSEGSAPGTSESATPESGPGTSTEPSEGSA |
| | PGTSESATPESGPGSEPATSGSETPGTSTEPSEGSAPGTSTEPSEGSAPGTSESATPESGPGTSESA |
| | TPESGPGSPAGSPTSTEEGTSESATPESGPGSEPATSGSETPGTSESATPESGPGTSTEPSEGSAPG |
| | TSTEPSEGSAPGTSTEPSEGSAPGTSTEPSEGSAPGTSTEPSEGSAPGTSTEPSEGSAPGSPAGSPT |
| | STEEGTSTEPSEGSAPGTSESATPESGPGSEPATSGSETPGTSESATPESGPGSEPATSGSETPGTS |
| | ESATPESGPGTSTEPSEGSAPGTSESATPESGPGSPAGSPTSTEEGSPAGSPTSTEEGSPAGSPTST |
| | EEGTSESATPESGPGTSTEPSEGSAPGTSESATPESGPGSEPATSGSETPGTSESATPESGPGSEPA |
| | TSGSETPGTSESATPESGPGTSTEPSEGSAPGSPAGSPTSTEEGTSESATPESGPGSEPATSGSETP |
| | GTSESATPESGPGSPAGSPTSTEEGSPAGSPTSTEEGTSTEPSEGSAPGTSESATPESGPGTSESAT |
| | PESGPGTSESATPESGPGSEPATSGSETPGSEPATSGSETPGSPAGSPTSTEEGTSTEPSEGSAPGT |
| | STEPSEGSAPGSEPATSGSETPGTSESATPESGPGTSTEPSEGSAP |
| FVIII | ATRRYYLGAVELSWDYMQSDLGELPVDARFPPRVPKSFPFNTSVVYKKTLFVEFTDHLFNIAK |
| BDD9- | PRPPWMGLLGPTIQAEVYDTVVITLKNMASHPVSLHAVGVSYWKASEGAEYDDQTSQREKED |
| AG288_3 | DKVFPGGSHTYVWQVLKENGPMASDPLCLTYSYLSHVDLVKDLNSGLIGALLVCREGSLAKE |
| | KTQTLHKFILLFAVFDEGKSWHSETKNSLMQDRDAASARAWPKMHTVNGYVNRSLPGLIGCH |
| | RKSVYWHVIGMGTTPEVHSIFLEGHTFLVRNHRQASLEISPITFLTAQTLLMDLGQFLLFCHISS |
| | HQHDGMEAYVKVDSCPEEPQLRMKNNEEAEDYDDDLTDSEMDVVRFDDDNSPSFIQIRSVAK |
| | KHPKTWVHYIAAEEEDWDYAPLVLAPDDRSYKSQYLNNGPQRIGRKYKKVRFMAYTDETFK |
| | TREAIQHESGILGPLLYGEVGDTLLIIFKNQASRPYNIYPHGITDVRPLYSRRLPKGVKHLKDFPI |
| | LPGEIFKYKWTVTVEDGPTKSDPRCLTRYYSSFVNMERDLASGLIGPLLICYKESVDQRGNQIM |
| | SDKRNVILFSVFDENRSWYLTENIQRFLPNPAGVQLEDPEFQASNIMHSINGYVFDSLQLSVCL |
| | HEVAYWYILSIGAQTDFLSVFFSGYTFKHKMVYEDTLTLFPFSGETVFMSMENPGLWILGCHN |
| | SDFRNRGMTALLKVSSCDKNTGDYYEDSYEDISAYLLSKNNAIEPRSFSQNPPVLKRHQREITR |
| | TTLQSDQEEIDYDDTISVEMKKEDFDIYDEDENQSPRSFQKKTRHYFIAAVERLWDYGMSSSPH |
| | VLRNRAQSGSVPQFKKVVFQEFTDGSFTQPLYRGELNEHLGLLGPYIRAEVEDNIMVTFRNQA |
| | SRPYSFYSSLISYEEDQRQGAEPRKNFVKPNETKTYFWKVQHHMAPTKDEFDCKAWAYFSDV |
| | DLEKDVHSGLIGPLLVCHTNTLNPAHGRQVTVQEFALFFTIFDETKSWYFTENMERNCRAPCNI |
| | QMEDPTFKENYRFHAINGYIMDTLPGLVMAQDQRIRWYLLSMGSNENIHSIHFSGHVFTVRKK |
| | EEYKMALYNLYPGVFETVEMLPSKAGIWRVECLIGEHLHAGMSTLFLVYSNKCQTPLGMASG |
| | HIRDFQITASGQYGQWAPKLARLHYSGSINAWSTKEPFSWIKVDLLAPMIIHGIKTQGARQKFS |
| | SLYISQFIIMYSLDGKKWQTYRGNSTGTLMVFFGNVDSSGIKHNIFNPPIIARYIRLHPTHYSIRS |
| | TLRMELMGCDLNSCSMPLGMESKAISDAQITASSYFTNMFATWSPSKARLHLQGRSNAWRPQ |
| | VNNPKEWLQVDFQKTMKVTGVTTQGVKSLLTSMYVKEFLISSSQDGHQWTLFFQNGKVKVF |
| | QGNQDSFTPVVNSLDPPLLTRYLRIHPQSWVHQIALRMEVLGCEAQDLYGGSSPSASTGTGPG |
| | SSPSASTGTGPGTPGSGTASSSPGSSTPSGATGSPGSSPSASTGTGPGASPGTSSTGSPGTPGSGT |
| | ASSSPGSSTPSGATGSPGTPGSGTASSSPGASPGTSSTGSPGASPGTSSTGSPGTPGSGTASSSPGS |
| | STPSGATGSPGASPGTSSTGSPGTPGSGTASSSPGSSTPSGATGSPGSSPSASTGTGPGSSPSASTG |
| | TGPGSSTPSGATGSPGSSTPSGATGSPGASPGTSSTGSPGASPGTSSTGSPGASPGTSSTGSPGTP |
| | GSGTASSSP |
| FVIII | ATRRYYLGAVELSWDYMQSDLGELPVDARFPPRVPKSFPFNTSVVYKKTLFVEFTDHLFNIAK |
| BDD9- | PRPPWMGLLGPTIQAEVYDTVVITLKNMASHPVSLHAVGVSYWKASEGAEYDDQTSQREKED |
| AG288_2 | DKVFPGGSHTYVWQVLKENGPMASDPLCLTYSYLSHVDLVKDLNSGLIGALLVCREGSLAKE |
| | KTQTLHKFILLFAVFDEGKSWHSETKNSLMQDRDAASARAWPKMHTVNGYVNRSLPGLIGCH |
| | RKSVYWHVIGMGTTPEVHSIFLEGHTFLVRNHRQASLEISPITFLTAQTLLMDLGQFLLFCHISS |
| | HQHDGMEAYVKVDSCPEEPQLRMKNNEEAEDYDDDLTDSEMDVVRFDDDNSPSFIQIRSVAK |
| | KHPKTWVHYIAAEEEDWDYAPLVLAPDDRSYKSQYLNNGPQRIGRKYKKVRFMAYTDETFK |
| | TREAIQHESGILGPLLYGEVGDTLLIIFKNQASRPYNIYPHGITDVRPLYSRRLPKGVKHLKDFPI |
| | LPGEIFKYKWTVTVEDGPTKSDPRCLTRYYSSFVNMERDLASGLIGPLLICYKESVDQRGNQIM |
| | SDKRNVILFSVFDENRSWYLTENIQRFLPNPAGVQLEDPEFQASNIMHSINGYVFDSLQLSVCL |
| | HEVAYWYILSIGAQTDFLSVFFSGYTFKHKMVYEDTLTLFPFSGETVFMSMENPGLWILGCHN |
| | SDFRNRGMTALLKVSSCDKNTGDYYEDSYEDISAYLLSKNNAIEPRSFSQNPPVLKRHQREITR |
| | TTLQSDQEEIDYDDTISVEMKKEDFDIYDEDENQSPRSFQKKTRHYFIAAVERLWDYGMSSSPH |
| | VLRNRAQSGSVPQFKKVVFQEFTDGSFTQPLYRGELNEHLGLLGPYIRAEVEDNIMVTFRNQA |
| | SRPYSFYSSLISYEEDQRQGAEPRKNFVKPNETKTYFWKVQHHMAPTKDEFDCKAWAYFSDV |
| | DLEKDVHSGLIGPLLVCHTNTLNPAHGRQVTVQEFALFFTIFDETKSWYFTENMERNCRAPCNI |
| | QMEDPTFKENYRFHAINGYIMDTLPGLVMAQDQRIRWYLLSMGSNENIHSIHFSGHVFTVRKK |
| | EEYKMALYNLYPGVFETVEMLPSKAGIWRVECLIGEHLHAGMSTLFLVYSNKCQTPLGMASG |
| | HIRDFQITASGQYGQWAPKLARLHYSGSINAWSTKEPFSWIKVDLLAPMIIHGIKTQGARQKFS |
| | SLYISQFIIMYSLDGKKWQTYRGNSTGTLMVFFGNVDSSGIKHNIFNPPIIARYIRLHPTHYSIRS |
| | TLRMELMGCDLNSCSMPLGMESKAISDAQITASSYFTNMFATWSPSKARLHLQGRSNAWRPQ |
| | VNNPKEWLQVDFQKTMKVTGVTTQGVKSLLTSMYVKEFLISSSQDGHQWTLFFQNGKVKVF |
| | QGNQDSFTPVVNSLDPPLLTRYLRIHPQSWVHQIALRMEVLGCEAQDLYGAGSPGAETAPGAS |
| | PGTSSTGSPGASPGTSSTGSPGTPGSGTASSSPGSSTPSGATGSPGTPGSGTASSSPGSSTPSGATG |
| | SPGTPGSGTASSSPGSSTPSGATGSPGSSTPSGATGSPGSSPSASTGTGPGSSPSASTGTGPGASPG |
| | TSSTGSPGTPGSGTASSSPGSSTPSGATGSPGSSPSASTGTGPGSSPSASTGTGPGASPGTSSTGSP |
| | GASPGTSSTGSPGSSTPSGATGSPGSSPSASTGTGPGASPGTSSTGSPGSSPSASTGTGPGTPGSG |
| | TASSSPGSSTPSGATGS |
| FVIII | ATRRYYLGAVELSWDYMQSDLGELPVDARFPPRVPKSFPFNTSVVYKKTLFVEFTDHLFNIAK |
| BDD9- | PRPPWMGLLGPTIQAEVYDTVVITLKNMASHPVSLHAVGVSYWKASEGAEYDDQTSQREKED |
| AG864 | DKVFPGGSHTYVWQVLKENGPMASDPLCLTYSYLSHVDLVKDLNSGLIGALLVCREGSLAKE |
| | KTQTLHKFILLFAVFDEGKSWHSETKNSLMQDRDAASARAWPKMHTVNGYVNRSLPGLIGCH |
| | RKSVYWHVIGMGTTPEVHSIFLEGHTFLVRNHRQASLEISPITFLTAQTLLMDLGQFLLFCHISS |
| | HQHDGMEAYVKVDSCPEEPQLRMKNNEEAEDYDDDLTDSEMDVVRFDDDNSPSFIQIRSVAK |
| | KHPKTWVHYIAAEEEDWDYAPLVLAPDDRSYKSQYLNNGPQRIGRKYKKVRFMAYTDETFK |
| | TREAIQHESGILGPLLYGEVGDTLLIIFKNQASRPYNIYPHGITDVRPLYSRRLPKGVKHLKDFPI |
| | LPGEIFKYKWTVTVEDGPTKSDPRCLTRYYSSFVNMERDLASGLIGPLLICYKESVDQRGNQIM |
| | SDKRNVILFSVFDENRSWYLTENIQRFLPNPAGVQLEDPEFQASNIMHSINGYVFDSLQLSVCL |
| | HEVAYWYILSIGAQTDFLSVFFSGYTFKHKMVYEDTLTLFPFSGETVFMSMENPGLWILGCHN |
| | SDFRNRGMTALLKVSSCDKNTGDYYEDSYEDISAYLLSKNNAIEPRSFSQNPPVLKRHQREITR |
| | TTLQSDQEEIDYDDTISVEMKKEDFDIYDEDENQSPRSFQKKTRHYFIAAVERLWDYGMSSSPH |
| | VLRNRAQSGSVPQFKKVVFQEFTDGSFTQPLYRGELNEHLGLLGPYIRAEVEDNIMVTFRNQA |
| | SRPYSFYSSLISYEEDQRQGAEPRKNFVKPNETKTYFWKVQHHMAPTKDEFDCKAWAYFSDV |
| | DLEKDVHSGLIGPLLVCHTNTLNPAHGRQVTVQEFALFFTIFDETKSWYFTENMERNCRAPCNI |
| | QMEDPTFKENYRFHAINGYIMDTLPGLVMAQDQRIRWYLLSMGSNENIHSIHFSGHVFTVRKK |
| | EEYKMALYNLYPGVFETVEMLPSKAGIWRVECLIGEHLHAGMSTLFLVYSNKCQTPLGMASG |
| | HIRDFQITASGQYGQWAPKLARLHYSGSINAWSTKEPFSWIKVDLLAPMIIHGIKTQGARQKFS |
| | SLYISQFIIMYSLDGKKWQTYRGNSTGTLMVFFGNVDSSGIKHNIFNPPIIARYIRLHPTHYSIRS |
| | TLRMELMGCDLNSCSMPLGMESKAISDAQITASSYFTNMFATWSPSKARLHLQGRSNAWRPQ |
| | VNNPKEWLQVDFQKTMKVTGVTTQGVKSLLTSMYVKEFLISSSQDGHQWTLFFQNGKVKVF |
| | QGNQDSFTPVVNSLDPPLLTRYLRIHPQSWVHQIALRMEVLGCEAQDLYGGSSPSASTGTGPG |
| | SSPSASTGTGPGTPGSGTASSSPGSSTPSGATGSPGSSPSASTGTGPGASPGTSSTGSPGTPGSGT |
| | ASSSPGSSTPSGATGSPGTPGSGTASSSPGASPGTSSTGSPGASPGTSSTGSPGTPGSGTASSSPGS |
| | STPSGATGSPGASPGTSSTGSPGTPGSGTASSSPGSSTPSGATGSPGSSPSASTGTGPGSSPSASTG |
| | TGPGSSTPSGATGSPGSSTPSGATGSPGASPGTSSTGSPGASPGTSSTGSPGASPGTSSTGSPGTP |
| | GSGTASSSP |
| FVIII | ATRRYYLGAVELSWDYMQSDLGELPVDARFPPRVPKSFPFNTSVVYKKTLFVEFTDHLFNIAK |
| BDD10- | PRPPWMGLLGPTIQAEVYDTVVITLKNMASHPVSLHAVGVSYWKASEGAEYDDQTSQREKED |
| AG288_2 | DKVFPGGSHTYVWQVLKENGPMASDPLCLTYSYLSHVDLVKDLNSGLIGALLVCREGSLAKE |
| | KTQTLHKFILLFAVFDEGKSWHSETKNSLMQDRDAASARAWPKMHTVNGYVNRSLPGLIGCH |
| | RKSVYWHVIGMGTTPEVHSIFLEGHTFLVRNHRQASLEISPITFLTAQTLLMDLGQFLLFCHISS |
| | HQHDGMEAYVKVDSCPEEPQLRMKNNEEAEDYDDDLTDSEMDVVRFDDDNSPSFIQIRSVAK |
| | KHPKTWVHYIAAEEEDWDYAPLVLAPDDRSYKSQYLNNGPQRIGRKYKKVRFMAYTDETFK |
| | TREAIQHESGILGPLLYGEVGDTLLIIFKNQASRPYNIYPHGITDVRPLYSRRLPKGVKHLKDFPI |
| | LPGEIFKYKWTVTVEDGPTKSDPRCLTRYYSSFVNMERDLASGLIGPLLICYKESVDQRGNQIM |
| | SDKRNVILFSVFDENRSWYLTENIQRFLPNPAGVQLEDPEFQASNIMHSINGYVFDSLQLSVCL |
| | HEVAYWYILSIGAQTDFLSVFFSGYTFKHKMVYEDTLTLFPFSGETVFMSMENPGLWILGCHN |
| | SDFRNRGMTALLKVSSCDKNTGDYYEDSYEDISAYLLSKNNAIEPRSFSQNPPVLKRHQAEITR |
| | TTLQSDQEEIDYDDTISVEMKKEDFDIYDEDENQSPRSFQKKTRHYFIAAVERLWDYGMSSSPH |
| | VLRNRAQSGSVPQFKKVVFQEFTDGSFTQPLYRGELNEHLGLLGPYIRAEVEDNIMVTFRNQA |
| | SRPYSFYSSLISYEEDQRQGAEPRKNFVKPNETKTYFWKVQHHMAPTKDEFDCKAWAYFSDV |
| | DLEKDVHSGLIGPLLVCHTNTLNPAHGRQVTVQEFALFFTIFDETKSWYFTENMERNCRAPCNI |
| | QMEDPTFKENYRFHAINGYIMDTLPGLVMAQDQRIRWYLLSMGSNENIHSIHFSGHVFTVRKK |
| | EEYKMALYNLYPGVFETVEMLPSKAGIWRVECLIGEHLHAGMSTLFLVYSNKCQTPLGMASG |
| | HIRDFQITASGQYGQWAPKLARLHYSGSINAWSTKEPFSWIKVDLLAPMIIHGIKTQGARQKFS |
| | SLYISQFIIMYSLDGKKWQTYRGNSTGTLMVFFGNVDSSGIKHNIFNPPIIARYIRLHPTHYSIRS |
| | TLRMELMGCDLNSCSMPLGMESKAISDAQITASSYFTNMFATWSPSKARLHLQGRSNAWRPQ |
| | VNNPKEWLQVDFQKTMKVTGVTTQGVKSLLTSMYVKEFLISSSQDGHQWTLFFQNGKVKVF |
| | QGNQDSFTPVVNSLDPPLLTRYLRIHPQSWVHQIALRMEVLGCEAQDLYGAGSPGAETAPGAS |
| | PGTSSTGSPGASPGTSSTGSPGTPGSGTASSSPGSSTPSGATGSPGTPGSGTASSSPGSSTPSGATG |
| | SPGTPGSGTASSSPGSSTPSGATGSPGSSTPSGATGSPGSSPSASTGTGPGSSPSASTGTGPGASPG |
| | TSSTGSPGTPGSGTASSSPGSSTPSGATGSPGSSPSASTGTGPGSSPSASTGTGPGASPGTSSTGSP |
| | GASPGTSSTGSPGSSTPSGATGSPGSSPSASTGTGPGASPGTSSTGSPGSSPSASTGTGPGTPGSG |
| | TASSSPGSSTPSGATGS |
| FVIII | ATRRYYLGAVELSWDYMQSDLGELPVDARFPPRVPKSFPFNTSVVYKKTLFVEFTDHLFNIAK |
| BDD10- | PRPPWMGLLGPTIQAEVYDTVVITLKNMASHPVSLHAVGVSYWKASEGAEYDDQTSQREKED |
| AG864 | DKVFPGGSHTYVWQVLKENGPMASDPLCLTYSYLSHVDLVKDLNSGLIGALLVCREGSLAKE |
| | KTQTLHKFILLFAVFDEGKSWHSETKNSLMQDRDAASARAWPKMHTVNGYVNRSLPGLIGCH |
| | RKSVYWHVIGMGTTPEVHSIFLEGHTFLVRNHRQASLEISPITFLTAQTLLMDLGQFLLFCHISS |
| | HQHDGMEAYVKVDSCPEEPQLRMKNNEEAEDYDDDLTDSEMDVVRFDDDNSPSFIQIRSVAK |
| | KHPKTWVHYIAAEEEDWDYAPLVLAPDDRSYKSQYLNNGPQRIGRKYKKVRFMAYTDETFK |
| | TREAIQHESGILGPLLYGEVGDTLLIIFKNQASRPYNIYPHGITDVRPLYSRRLPKGVKHLKDFPI |
| | LPGEIFKYKWTVTVEDGPTKSDPRCLTRYYSSFVNMERDLASGLIGPLLICYKESVDQRGNQIM |
| | SDKRNVILFSVFDENRSWYLTENIQRFLPNPAGVQLEDPEFQASNIMHSINGYVFDSLQLSVCL |
| | HEVAYWYILSIGAQTDFLSVFFSGYTFKHKMVYEDTLTLFPFSGETVFMSMENPGLWILGCHN |
| | SDFRNRGMTALLKVSSCDKNTGDYYEDSYEDISAYLLSKNNAIEPRSFSQNPPVLKRHQAEITR |
| | TTLQSDQEEIDYDDTISVEMKKEDFDIYDEDENQSPRSFQKKTRHYFIAAVERLWDYGMSSSPH |
| | VLRNRAQSGSVPQFKKVVFQEFTDGSFTQPLYRGELNEHLGLLGPYIRAEVEDNIMVTFRNQA |
| | SRPYSFYSSLISYEEDQRQGAEPRKNFVKPNETKTYFWKVQHHMAPTKDEFDCKAWAYFSDV |
| | DLEKDVHSGLIGPLLVCHTNTLNPAHGRQVTVQEFALFFTIFDETKSWYFTENMERNCRAPCNI |
| | QMEDPTFKENYRFHAINGYIMDTLPGLVMAQDQRIRWYLLSMGSNENIHSIHFSGHVFTVRKK |
| | EEYKMALYNLYPGVFETVEMLPSKAGIWRVECLIGEHLHAGMSTLFLVYSNKCQTPLGMASG |
| | HIRDFQITASGQYGQWAPKLARLHYSGSINAWSTKEPFSWIKVDLLAPMIIHGIKTQGARQKFS |
| | SLYISQFIIMYSLDGKKWQTYRGNSTGTLMVFFGNVDSSGIKHNIFNPPIIARYIRLHPTHYSIRS |
| | TLRMELMGCDLNSCSMPLGMESKAISDAQITASSYFTNMFATWSPSKARLHLQGRSNAWRPQ |
| | VNNPKEWLQVDFQKTMKVTGVTTQGVKSLLTSMYVKEFLISSSQDGHQWTLFFQNGKVKVF |
| | QGNQDSFTPVVNSLDPPLLTRYLRIHPQSWVHQIALRMEVLGCEAQDLY |
| FVIII | ATRRYYLGAVELSWDYMQSDLGELPVDARFPPRVPKSFPFNTSVVYKKTLFVEFTDHLFNIAK |
| BDD10- | PRPPWMGLLGPTIQAEVYDTVVITLKNMASHPVSLHAVGVSYWKASEGAEYDDQTSQREKED |
| AE288 | DKVFPGGSHTYVWQVLKENGPMASDPLCLTYSYLSHVDLVKDLNSGLIGALLVCREGSLAKE |
| | KTQTLHKFILLFAVFDEGKSWHSETKNSLMQDRDAASARAWPKMHTVNGYVNRSLPGLIGCH |
| | RKSVYWHVIGMGTTPEVHSIFLEGHTFLVRNHRQASLEISPITFLTAQTLLMDLGQFLLFCHISS |
| | HQHDGMEAYVKVDSCPEEPQLRMKNNEEAEDYDDDLTDSEMDVVRFDDDNSPSFIQIRSVAK |
| | KHPKTWVHYIAAEEEDWDYAPLVLAPDDRSYKSQYLNNGPQRIGRKYKKVRFMAYTDETFK |
| | TREAIQHESGILGPLLYGEVGDTLLIIFKNQASRPYNIYPHGITDVRPLYSRRLPKGVKHLKDFPI |
| | LPGEIFKYKWTVTVEDGPTKSDPRCLTRYYSSFVNMERDLASGLIGPLLICYKESVDQRGNQIM |
| | SDKRNVILFSVFDENRSWYLTENIQRFLPNPAGVQLEDPEFQASNIMHSINGYVFDSLQLSVCL |
| | HEVAYWYILSIGAQTDFLSVFFSGYTFKHKMVYEDTLTLFPFSGETVFMSMENPGLWILGCHN |
| | SDFRNRGMTALLKVSSCDKNTGDYYEDSYEDISAYLLSKNNAIEPRSFSQNPPVLKRHQAEITR |
| | TTLQSDQEEIDYDDTISVEMKKEDFDIYDEDENQSPRSFQKKTRHYFIAAVERLWDYGMSSSPH |
| | VLRNRAQSGSVPQFKKVVFQEFTDGSFTQPLYRGELNEHLGLLGPYIRAEVEDNIMVTFRNQA |
| | SRPYSFYSSLISYEEDQRQGAEPRKNFVKPNETKTYFWKVQHHMAPTKDEFDCKAWAYFSDV |
| | DLEKDVHSGLIGPLLVCHTNTLNPAHGRQVTVQEFALFFTIFDETKSWYFTENMERNCRAPCNI |
| | QMEDPTFKENYRFHAINGYIMDTLPGLVMAQDQRIRWYLLSMGSNENIHSIHFSGHVFTVRKK |
| | EEYKMALYNLYPGVFETVEMLPSKAGIWRVECLIGEHLHAGMSTLFLVYSNKCQTPLGMASG |
| | HIRDFQITASGQYGQWAPKLARLHYSGSINAWSTKEPFSWIKVDLLAPMIIHGIKTQGARQKFS |
| | SLYISQFIIMYSLDGKKWQTYRGNSTGTLMVFFGNVDSSGIKHNIFNPPIIARYIRLHPTHYSIRS |
| | TLRMELMGCDLNSCSMPLGMESKAISDAQITASSYFTNMFATWSPSKARLHLQGRSNAWRPQ |
| | VNNPKEWLQVDFQKTMKVTGVTTQGVKSLLTSMYVKEFLISSSQDGHQWTLFFQNGKVKVF |
| | QGNQDSFTPVVNSLDPPLLTRYLRIHPQSWVHQIALRMEVLGCEAQDLYGGTSESATPESGPGS |
| | EPATSGSETPGTSESATPESGPGSEPATSGSETPGTSESATPESGPGTSTEPSEGSAPGSPAGSPTS |
| | TEEGTSESATPESGPGSEPATSGSETPGTSESATPESGPGSPAGSPTSTEEGSPAGSPTSTEEGTST |
| | EPSEGSAPGTSESATPESGPGTSESATPESGPGTSESATPESGPGSEPATSGSETPGSEPATSGSET |
| | PGSPAGSPTSTEEGTSTEPSEGSAPGTSTEPSEGSAPGSEPATSGSETPGTSESATPESGPGTSTEP |
| | SEGSAP |
| FVIII | ATRRYYLGAVELSWDYMQSDLGELPVDARFPPRVPKSFPFNTSVVYKKTLFVEFTDHLFNIAK |
| BDD10- | PRPPWMGLLGPTIQAEVYDTVVITLKNMASHPVSLHAVGVSYWKASEGAEYDDQTSQREKED |
| AE864 | DKVFPGGSHTYVWQVLKENGPMASDPLCLTYSYLSHVDLVKDLNSGLIGALLVCREGSLAKE |
| | KTQTLHKFILLFAVFDEGKSWHSETKNSLMQDRDAASARAWPKMHTVNGYVNRSLPGLIGCH |
| | RKSVYWHVIGMGTTPEVHSIFLEGHTFLVRNHRQASLEISPITFLTAQTLLMDLGQFLLFCHISS |
| | HQHDGMEAYVKVDSCPEEPQLRMKNNEEAEDYDDDLTDSEMDVVRFDDDNSPSFIQIRSVAK |
| | KHPKTWVHYIAAEEEDWDYAPLVLAPDDRSYKSQYLNNGPQRIGRKYKKVRFMAYTDETFK |
| | TREAIQHESGILGPLLYGEVGDTLLIIFKNQASRPYNIYPHGITDVRPLYSRRLPKGVKHLKDFPI |
| | LPGEIFKYKWTVTVEDGPTKSDPRCLTRYYSSFVNMERDLASGLIGPLLICYKESVDQRGNQIM |
| | SDKRNVILFSVFDENRSWYLTENIQRFLPNPAGVQLEDPEFQASNIMHSINGYVFDSLQLSVCL |
| | HEVAYWYILSIGAQTDFLSVFFSGYTFKHKMVYEDTLTLFPFSGETVFMSMENPGLWILGCHN |
| | SDFRNRGMTALLKVSSCDKNTGDYYEDSYEDISAYLLSKNNAIEPRSFSQNPPVLKRHQAEITR |
| | TTLQSDQEEIDYDDTISVEMKKEDFDIYDEDENQSPRSFQKKTRHYFIAAVERLWDYGMSSSPH |
| | VLRNRAQSGSVPQFKKVVFQEFTDGSFTQPLYRGELNEHLGLLGPYIRAEVEDNIMVTFRNQA |
| | SRPYSFYSSLISYEEDQRQGAEPRKNFVKPNETKTYFWKVQHHMAPTKDEFDCKAWAYFSDV |
| | DLEKDVHSGLIGPLLVCHTNTLNPAHGRQVTVQEFALFFTIFDETKSWYFTENMERNCRAPCNI |
| | QMEDPTFKENYRFHAINGYIMDTLPGLVMAQDQRIRWYLLSMGSNENIHSIHFSGHVFTVRKK |
| | EEYKMALYNLYPGVFETVEMLPSKAGIWRVECLIGEHLHAGMSTLFLVYSNKCQTPLGMASG |
| | HIRDFQITASGQYGQWAPKLARLHYSGSINAWSTKEPFSWIKVDLLAPMIIHGIKTQGARQKFS |
| | SLYISQFIIMYSLDGKKWQTYRGNSTGTLMVFFGNVDSSGIKHNIFNPPIIARYIRLHPTHYSIRS |
| | TLRMELMGCDLNSCSMPLGMESKAISDAQITASSYFTNMFATWSPSKARLHLQGRSNAWRPQ |
| | VNNPKEWLQVDFQKTMKVTGVTTQGVKSLLTSMYVKEFLISSSQDGHQWTLFFQNGKVKVF |
| | QGNQDSFTPVVNSLDPPLLTRYLRIHPQSWVHQIALRMEVLGCEAQDLYGGSPAGSPTSTEEGT |
| | SESATPESGPGTSTEPSEGSAPGSPAGSPTSTEEGTSTEPSEGSAPGTSTEPSEGSAPGTSESATPE |
| | SGPGSEPATSGSETPGSEPATSGSETPGSPAGSPTSTEEGTSESATPESGPGTSTEPSEGSAPGTST |
| | EPSEGSAPGSPAGSPTSTEEGTSTEPSEGSAPGTSTEPSEGSAPGTSESATPESGPGTSTEPSEGSA |
| | PGTSESATPESGPGSEPATSGSETPGTSTEPSEGSAPGTSTEPSEGSAPGTSESATPESGPGTSESA |
| | TPESGPGSPAGSPTSTEEGTSESATPESGPGSEPATSGSETPGTSESATPESGPGTSTEPSEGSAPG |
| | TSTEPSEGSAPGTSTEPSEGSAPGTSTEPSEGSAPGTSTEPSEGSAPGTSTEPSEGSAPGSPAGSPT |
| | STEEGTSTEPSEGSAPGTSESATPESGPGSEPATSGSETPGTSESATPESGPGSEPATSGSETPGTS |
| | ESATPESGPGTSTEPSEGSAPGTSESATPESGPGSPAGSPTSTEEGSPAGSPTSTEEGSPAGSPTST |
| | EEGTSESATPESGPGTSTEPSEGSAPGTSESATPESGPGSEPATSGSETPGTSESATPESGPGSEPA |
| | TSGSETPGTSESATPESGPGTSTEPSEGSAPGSPAGSPTSTEEGTSESATPESGPGSEPATSGSETP |
| | GTSESATPESGPGSPAGSPTSTEEGSPAGSPTSTEEGTSTEPSEGSAPGTSESATPESGPGTSESAT |
| | PESGPGTSESATPESGPGSEPATSGSETPGSEPATSGSETPGSPAGSPTSTEEGTSTEPSEGSAPGT |
| | STEPSEGSAPGSEPATSGSETPGTSESATPESGPGTSTEPSEGSAP |

*Sequence name reflects N- to C-terminus configuration of the coagulation factor and XTEN components

TABLE 29
Exemplary CFXTEN comprising FVIII and internal/external XTEN sequences

| CFXTEN | |
|---|---|
| Name* | Amino Acid Sequence |
| FVIII BDD2 | ATRRYYLGAVELSWDYMQSDLGELPVDARFPPRVPKSFPFNTSVVYKKTLFVEFTVHLFNIA |
| (A1-K127- | KPRPPWMGLLGPTIQAEVYDTVVITLKNMASHPVSLHAVGVSYWKASEGAEYDDQTSQRE |
| AE144- | KEDDKGGSEPATSGSETPGTSESATPESGPGSEPATSGSETPGSPAGSPTSTEEGTSTEPSEGSA |
| V128-N745- | PGSEPATSGSETPGSEPATSGSETPGSEPATSGSETPGTSTEPSEGSAPGTSESATPESGPGSEPA |
| AE288- | TSGSETPGTSTEPSEGSAPGVFPGGSHTYVWQVLKENGPMASDPLCLTYSYLSHVDLVKDLN |
| P1640- | SGLIGALLVCREGSLAKEKTQTLHKFILLFAVFDEGKSWHSETKNSLMQDRDAASARAWPK |
| Y2332) | MHTVNGYVNRSLPGLIGCHRKSVYWHVIGMGTTPEVHSIFLEGHTFLVRNHRQASLEISPITF |
| | LTAQTLLMDLGQFLLFCHISSHQHDGMEAYVKVDSCPEEPQLRMKNNEEAEDYDDDLTDSE |
| | MDVVRFDDDNSPSFIQIRSVAKKHPKTWVHYIAAEEEDWDYAPLVLAPDDRSYKSQYLNNG |
| | PQRIGRKYKKVRFMAYTDETFKTREAIQHESGILGPLLYGEVGDTLLIIFKNQASRPYNIYPH |
| | GITDVRPLYSRRLPKGVKHLKDFPILPGEIFKYKWTVTVEDGPTKSDPRCLTRYYSSFVNMER |
| | DLASGLIGPLLICYKESVDQRGNQIMSDKRNVILFSVFDENRSWYLTENIQRFLPNPAGVQLE |
| | DPEFQASNIMHSINGYVFDSLQLSVCLHEVAYWYILSIGAQTDFLSVFFSGYTFKHKMVYED |
| | TLTLFPFSGETVFMSMENPGLWILGCHNSDFRNRGMTALLKVSSCDKNTGDYYEDSYEDISA |
| | YLLSKNNAIEPRSFSQNGGTSESATPESGPGSEPATSGSETPGTSESATPESGPGSEPATSGSET |
| | PGTSESATPESGPGTSTEPSEGSAPGSPAGSPTSTEEGTSESATPESGPGSEPATSGSETPGTSES |
| | ATPESGPGSPAGSPTSTEEGSPAGSPTSTEEGTSTEPSEGSAPGTSESATPESGPGTSESATPESG |
| | PGTSESATPESGPGSEPATSGSETPGSEPATSGSETPGSPAGSPTSTEEGTSTEPSEGSAPGTSTE |
| | PSEGSAPGSEPATSGSETPGTSESATPESGPGTSTEPSEGSAPGPPVLKRHQREITRTTLQSDQE |
| | EIDYDDTISVEMKKEDFDIYDEDENQSPRSFQKKTRHYFIAAVERLWDYGMSSSPHVLRNRA |
| | QSGSVPQFKKVVFQEFTDGSFTQPLYRGELNEHLGLLGPYIRAEVEDNIMVTFRNQASRPYSF |
| | YSSLISYEEDQRQGAEPRKNFVKPNETKTYFWKVQHHMAPTKDEFDCKAWAYFSDVDLEK |
| | DVHSGLIGPLLVCHTNTLNPAHGRQVTVQEFALFFTIFDETKSWYFTENMERNCRAPCNIQM |
| | EDPTFKENYRFHAINGYIMDTLPGLVMAQDQRIRWYLLSMGSNENIHSIHFSGHVFTVRKKE |
| | EYKMALYNLYPGVFETVEMLPSKAGIWRVECLIGEHLHAGMSTLFLVYSNKCQTPLGMASG |
| | HIRDFQITASGQYGQWAPKLARLHYSGSINAWSTKEPFSWIKVDLLAPMIIHGIKTQGARQKF |
| | SSLYISQFIIMYSLDGKKWQTYRGNSTGTLMVFFGNVDSSGIKHNIFNPPIIARYIRLHPTHYSI |
| | RSTLRMELMGCDLNSCSMPLGMESKAISDAQITASSYFTNMFATWSPSKARLHLQGRSNAW |
| | RPQVNNPKEWLQVDFQKTMKVTGVTTQGVKSLLTSMYVKEFLISSSQDGHQWTLFFQNGK |
| | VKVFQGNQDSFTPVVNSLDPPLLTRYLRIHPQSWVHQIALRMEVLGCEAQDLY |
| FVIII BDD2 | ATRRYYLGAVELSWDYMQSDLGELPVDARFPPRVPKSFPFNTSVVYKKTLFVEFTVHLFNIA |
| (A1-A375- | KPRPPWMGLLGPTIQAEVYDTVVITLKNMASHPVSLHAVGVSYWKASEGAEYDDQTSQRE |
| AE576- | KEDDKVFPGGSHTYVWQVLKENGPMASDPLCLTYSYLSHVDLVKDLNSGLIGALLVCREGS |
| K376-N745- | LAKEKTQTLHKFILLFAVFDEGKSWHSETKNSLMQDRDAASARAWPKMHTVNGYVNRSLP |
| AE144- | GLIGCHRKSVYWHVIGMGTTPEVHSIFLEGHTFLVRNHRQASLEISPITFLTAQTLLMDLGQF |
| P1640- | LLFCHISSHQHDGMEAYVKVDSCPEEPQLRMKNNEEAEDYDDDLTDSEMDVVRFDDDNSP |
| Y2332) | SFIQIRSVAGGSPAGSPTSTEEGTSESATPESGPGTSTEPSEGSAPGSPAGSPTSTEEGTSTEPSE |
| | GSAPGTSTEPSEGSAPGTSESATPESGPGSEPATSGSETPGSEPATSGSETPGSPAGSPTSTEEG |
| | TSESATPESGPGTSTEPSEGSAPGTSTEPSEGSAPGSPAGSPTSTEEGTSTEPSEGSAPGTSTEPS |
| | EGSAPGTSESATPESGPGTSTEPSEGSAPGTSESATPESGPGSEPATSGSETPGTSTEPSEGSAP |
| | GTSTEPSEGSAPGTSESATPESGPGTSESATPESGPGSPAGSPTSTEEGTSESATPESGPGSEPAT |
| | SGSETPGTSESATPESGPGTSTEPSEGSAPGTSTEPSEGSAPGTSTEPSEGSAPGTSTEPSEGSAP |
| | GTSTEPSEGSAPGTSTEPSEGSAPGSPAGSPTSTEEGTSTEPSEGSAPGTSESATPESGPGSEPAT |
| | SGSETPGTSESATPESGPGSEPATSGSETPGTSESATPESGPGTSTEPSEGSAPGTSESATPESGP |
| | GSPAGSPTSTEEGSPAGSPTSTEEGSPAGSPTSTEEGTSESATPESGPGTSTEPSEGSAPGKKHP |
| | KTWVHYIAAEEEDWDYAPLVLAPDDRSYKSQYLNNGPQRIGRKYKKVRFMAYTDETFKTR |
| | EAIQHESGILGPLLYGEVGDTLLIIFKNQASRPYNIYPHGITDVRPLYSRRLPKGVKHLKDFPIL |
| | PGEIFKYKWTVTVEDGPTKSDPRCLTRYYSSFVNMERDLASGLIGPLLICYKESVDQRGNQI |
| | MSDKRNVILFSVFDENRSWYLTENIQRFLPNPAGVQLEDPEFQASNIMHSINGYVFDSLQLSV |
| | CLHEVAYWYILSIGAQTDFLSVFFSGYTFKHKMVYEDTLTLFPFSGETVFMSMENPGLWILG |
| | CHNSDFRNRGMTALLKVSSCDKNTGDYYEDSYEDISAYLLSKNNAIEPRSFSQNGGSEPATS |
| | GSETPGTSESATPESGPGSEPATSGSETPGSPAGSPTSTEEGTSTEPSEGSAPGSEPATSGSETPG |
| | SEPATSGSETPGSEPATSGSETPGTSTEPSEGSAPGTSESATPESGPGSEPATSGSETPGTSTEPS |
| | EGSAPGPPVLKRHQREITRTTLQSDQEEIDYDDTISVEMKKEDFDIYDEDENQSPRSFQKKTR |
| | HYFIAAVERLWDYGMSSSPHVLRNRAQSGSVPQFKKVVFQEFTDGSFTQPLYRGELNEHLG |
| | LLGPYIRAEVEDNIMVTFRNQASRPYSFYSSLISYEEDQRQGAEPRKNFVKPNETKTYFWKV |
| | QHHMAPTKDEFDCKAWAYFSDVDLEKDVHSGLIGPLLVCHTNTLNPAHGRQVTVQEFALF |
| | FTIFDETKSWYFTENMERNCRAPCNIQMEDPTFKENYRFHAINGYIMDTLPGLVMAQDQRIR |
| | WYLLSMGSNENIHSIHFSGHVFTVRKKEEYKMALYNLYPGVFETVEMLPSKAGIWRVECLI |
| | GEHLHAGMSTLFLVYSNKCQTPLGMASGHIRDFQITASGQYGQWAPKLARLHYSGSINAWS |
| | TKEPFSWIKVDLLAPMIIHGIKTQGARQKFSSLYISQFIIMYSLDGKKWQTYRGNSTGTLMVF |
| | FGNVDSSGIKHNIFNPPIIARYIRLHPTHYSIRSTLRMELMGCDLNSCSMPLGMESKAISDAQIT |
| | ASSYFTNMFATWSPSKARLHLQGRSNAWRPQVNNPKEWLQVDFQKTMKVTGVTTQGVKS |
| | LLTSMYVKEFLISSSQDGHQWTLFFQNGKVKVFQGNQDSFTPVVNSLDPPLLTRYLRIHPQS |
| | WVHQIALRMEVLGCEAQDLY |
| FVIII BDD2 | ATRRYYLGAVELSWDYMQSDLGELPVDARFPPRVPKSFPFNTSVVYKKTLFVEFTVHLFNIA |
| (A1-Y1792- | KPRPPWMGLLGPTIQAEVYDTVVITLKNMASHPVSLHAVGVSYWKASEGAEYDDQTSQRE |
| AF144- | KEDDKVFPGGSHTYVWQVLKENGPMASDPLCLTYSYLSHVDLVKDLNSGLIGALLVCREGS |
| E1793- | LAKEKTQTLHKFILLFAVFDEGKSWHSETKNSLMQDRDAASARAWPKMHTVNGYVNRSLP |
| Y2332- | GLIGCHRKSVYWHVIGMGTTPEVHSIFLEGHTFLVRNHRQASLEISPITFLTAQTLLMDLGQF |
| AE864) | LLFCHISSHQHDGMEAYVKVDSCPEEPQLRMKNNEEAEDYDDDLTDSEMDVVRFDDDNSP |
| | SFIQIRSVAKKHPKTWVHYIAAEEEDWDYAPLVLAPDDRSYKSQYLNNGPQRIGRKYKKVR |
| | FMAYTDETFKTREAIQHESGILGPLLYGEVGDTLLIIFKNQASRPYNIYPHGITDVRPLYSRRL |
| | PKGVKHLKDFPILPGEIFKYKWTVTVEDGPTKSDPRCLTRYYSSFVNMERDLASGLIGPLLIC |
| | YKESVDQRGNQIMSDKRNVILFSVFDENRSWYLTENIQRFLPNPAGVQLEDPEFQASNIMHSI |
| | NGYVFDSLQLSVCLHEVAYWYILSIGAQTDFLSVFFSGYTFKHKMVYEDTLTLFPFSGETVF |
| | MSMENPGLWILGCHNSDFRNRGMTALLKVSSCDKNTGDYYEDSYEDISAYLLSKNNAIEPR |
| | SFSQNPPVLKRHQREITRTTLQSDQEEIDYDDTISVEMKKEDFDIYDEDENQSPRSFQKKTRH |
| | YFIAAVERLWDYGMSSSPHVLRNRAQSGSVPQFKKVVFQEFTDGSFTQPLYRGELNEHLGL |
| | LGPYIRAEVEDNIMVTFRNQASRPYSFYSSLISYGGTSTPESGSASPGTSPSGESSTAPGTSPSG |
| | ESSTAPGSTSSTAESPGPGSTSESPSGTAPGSTSSTAESPGPGTSPSGESSTAPGTSTPESGSASP |
| | GSTSSTAESPGPGTSPSGESSTAPGTSPSGESSTAPGTSPSGESSTAPGEEDQRQGAEPRKNFV |
| | KPNETKTYFWKVQHHMAPTKDEFDCKAWAYFSDVDLEKDVHSGLIGPLLVCHTNTLNPAH |
| | GRQVTVQEFALFFTIFDETKSWYFTENMERNCRAPCNIQMEDPTFKENYRFHAINGYIMDTL |
| | PGLVMAQDQRIRWYLLSMGSNENIHSIHFSGHVFTVRKKEEYKMALYNLYPGVFETVEMLP |
| | SKAGIWRVECLIGEHLHAGMSTLFLVYSNKCQTPLGMASGHIRDFQITASGQYGQWAPKLA |
| | RLHYSGSINAWSTKEPFSWIKVDLLAPMIIHGIKTQGARQKFSSLYISQFIIMYSLDGKKWQT |
| | YRGNSTGTLMVFFGNVDSSGIKHNIFNPPIIARYIRLHPTHYSIRSTLRMELMGCDLNSCSMPL |
| | GMESKAISDAQITASSYFTNMFATWSPSKARLHLQGRSNAWRPQVNNPKEWLQVDFQKTM |
| | KVTGVTTQGVKSLLTSMYVKEFLISSSQDGHQWTLFFQNGKVKVFQGNQDSFTPVVNSLDP |
| | PLLTRYLRIHPQSWVHQIALRMEVLGCEAQDLYGGSPAGSPTSTEEGTSESATPESGPGTSTE |
| | PSEGSAPGSPAGSPTSTEEGTSTEPSEGSAPGTSTEPSEGSAPGTSESATPESGPGSEPATSGSET |
| | PGSEPATSGSETPGSPAGSPTSTEEGTSESATPESGPGTSTEPSEGSAPGTSTEPSEGSAPGSPA |
| | GSPTSTEEGTSTEPSEGSAPGTSTEPSEGSAPGTSESATPESGPGTSTEPSEGSAPGTSESATPES |
| | GPGSEPATSGSETPGTSTEPSEGSAPGTSTEPSEGSAPGTSESATPESGPGTSESATPESGPGSP |
| | AGSPTSTEEGTSESATPESGPGSEPATSGSETPGTSESATPESGPGTSTEPSEGSAPGTSTEPSEG |
| | SAPGTSTEPSEGSAPGTSTEPSEGSAPGTSTEPSEGSAPGTSTEPSEGSAPGSPAGSPTSTEEGTS |
| | TEPSEGSAPGTSESATPESGPGSEPATSGSETPGTSESATPESGPGSEPATSGSETPGTSESATPE |
| | SGPGTSTEPSEGSAPGTSESATPESGPGSPAGSPTSTEEGSPAGSPTSTEEGSPAGSPTSTEEGTS |
| | ESATPESGPGTSTEPSEGSAPGTSESATPESGPGSEPATSGSETPGTSESATPESGPGSEPATSGS |
| | ETPGTSESATPESGPGTSTEPSEGSAPGSPAGSPTSTEEGTSESATPESGPGSEPATSGSETPGTS |
| | ESATPESGPGSPAGSPTSTEEGSPAGSPTSTEEGTSTEPSEGSAPGTSESATPESGPGTSESATPE |
| | SGPGTSESATPESGPGSEPATSGSETPGSEPATSGSETPGSPAGSPTSTEEGTSTEPSEGSAPGTS |
| | TEPSEGSAPGSEPATSGSETPGTSESATPESGPGTSTEPSEGSAP |
| FVIII BDD2 | ATRRYYLGAVELSWDYMQSDLGELPVDARFPPRVPKSFPFNTSVVYKKTLFVEFTVHLFNIA |
| (A1-Y2043- | KPRPPWMGLLGPTIQAEVYDTVVITLKNMASHPVSLHAVGVSYWKASEGAEYDDQTSQRE |
| AG144- | KEDDKVFPGGSHTYVWQVLKENGPMASDPLCLTYSYLSHVDLVKDLNSGLIGALLVCREGS |
| G2044- | LAKEKTQTLHKFILLFAVFDEGKSWHSETKNSLMQDRDAASARAWPKMHTVNGYVNRSLP |
| Q2222- | GLIGCHRKSVYWHVIGMGTTPEVHSIFLEGHTFLVRNHRQASLEISPITFLTAQTLLMDLGQF |
| AG864- | LLFCHISSHQHDGMEAYVKVDSCPEEPQLRMKNNEEAEDYDDDLTDSEMDVVRFDDDNSP |
| V2223- | SFIQIRSVAKKHPKTWVHYIAAEEEDWDYAPLVLAPDDRSYKSQYLNNGPQRIGRKYKKVR |
| Y2332) | FMAYTDETFKTREAIQHESGILGPLLYGEVGDTLLIIFKNQASRPYNIYPHGITDVRPLYSRRL |
| | PKGVKHLKDFPILPGLIFKYKWTVTVEDGPTKSDPRCLTRYYSSFVNMERDLASGLIGPLLIC |
| | YKESVDQRGNQIMSDKRNVILFSVFDENRSWYLTENIQRFLPNPAGVQLEDPEFQASNIMHSI |
| | NGYVFDSLQLSVCLHEVAYWYILSIGAQTDFLSVFFSGYTFKHKMVYEDTLTLFPFSGETVF |
| | MSMENPGLWILGCHNSDFRNRGMTALLKVSSCDKNTGDYYLDSYLDISAYLLSKNNAILPR |
| | SFSQNPPVLKRHQRLITRTTLQSDQEEIDYDDTISVEMKKEDFDIYDEDENQSPRSFQKKTRH |
| | YFIAAVERLWDYGMSSSPHVLRNRAQSGSVPQFKKVVFQEFTDGSFTQPLYRGELNEHLGL |
| | LGPYIRALVEDNIMVTFRNQASRPYSFYSSLISYEEDQRQGALPRKNFVKPNETKTYFWKVQ |
| | HHMAPTKDEFDCKAWAYFSDVDLEKDVHSGLIGPLLVCHTNTLNPAHGRQVTVQEFALFFT |
| | IFDETKSWYFTENMERNCRAPCNIQMEDPTFKENYRFHAINGYIMDTLPGLVMAQDQRIRW |
| | YLLSMGSNENIHSIHFSGHVFTVRKKEEYKMALYNLYPGVFETVEMLPSKAGIWRVECLIGE |
| | HLHAGMSTLFLVYSNKCQTPLGMASGHIRDFQITASGQYGPGSSPSASTGTGPGSSPSASTGT |
| | GPGTPGSGTASSSPGSSTPSGATGSPGSSPSASTGTGPGASPGTSSTGSPGTPGSGTASSSPGSS |
| | TPSGATGSPGTPGSGTASSSPGASPGTSSTGSPGASPGTSSTGSPGTPGSGTASSSGGQWAPKL |
| | ARLHYSGSINAWSTKEPFSWIKVDLLAPMIIHGIKTQGARQKFSSLYISQFIIMYSLDGKKWQ |
| | TYRGNSTGTLMVFFGNVDSSGIKHNIFNPPIIARYIRLHPTHYSIRSTLRMELMGCDLNSCSMP |
| | LGMESKAISDAQITASSYFTNMFATWSPSKARLHLQGRSNAWRPQGGASPGTSSTGSPGSSP |
| | SASTGTGPGSSPSASTGTGPGTPGSGTASSSPGSSTPSGATGSPGSSPSASTGTGPGASPGTSST |
| | GSPGTPGSGTASSSPGSSTPSGATGSPGTPGSGTASSSPGASPGTSSTGSPGASPGTSSTGSPGT |
| | PGSGTASSSPGSSTPSGATGSPGASPGTSSTGSPGTPGSGTASSSPGSSTPSGATGSPGSSPSAST |
| | GTGPGSSPSASTGTGPGSSTPSGATGSPGSSTPSGATGSPGASPGTSSTGSPGASPGTSSTGSPG |
| | ASPGTSSTGSPGTPGSGTASSSPGASPGTSSTGSPGASPGTSSTGSPGASPGTSSTGSPGSSPSAS |
| | TGTGPGTPGSGTASSSPGASPGTSSTGSPGASPGTSSTGSPGASPGTSSTGSPGSSTPSGATGSP |
| | GSSTPSGATGSPGASPGTSSTGSPGTPGSGTASSSPGSSTPSGATGSPGSSTPSGATGSPGSSTP |
| | SGATGSPGSSPSASTGTGPGASPGTSSTGSPGASPGTSSTGSPGTPGSGTASSSPGASPGTSSTG |
| | SPGASPGTSSTGSPGASPGTSSTGSPGASPGTSSTGSPGTPGSGTASSSPGSSTPSGATGSPGTP |
| | GSGTASSSPGSSTPSGATGSPGTPGSGTASSSPGSSTPSGATGSPGSSTPSGATGSPGSSPSAST |
| | GTGPGSSPSASTGTGPGASPGTSSTGSPGTPGSGTASSSPGSSTPSGATGSPGSSPSASTGTGPG |
| | SSPSASTGTGPGASPGTSSTGSPGASPGTSSTGSPGSSTPSGATGSPGSSPSASTGTGPGASPGT |
| | SSTGSPGSSPSASTGTGPGTPGSGTASSSPGSSTPSGATGSPGSSTPSGATGSPGASPGTSSTGS |
| | PGVNNPKEWLQVDFQKTMKVTGVTTQGVKSLLTSMYVKLFLISSSQDGHQWTLFFQNGKV |
| | KVFQGNQDSFTPVVNSLDPPLLTRYLRIHPQSWVHQIALRMEVLGCLAQDLY |
| FVIII BDD2 | ATRRYYLGAVELSWDYMQSDLGELPVDARFPPRVPKSFPFNTSVVYKKTLFVEFTVHLFNI |
| (A1-G1799- | AKPRPPWMGLLGPTIQAEVYDTVVITLKNMASHPVSLHAVGVSYWKASEGAEYDDQTSQ |
| AE144- | REKEDDKVFPGGSHTYVWQVLKENGPMASDPLCLTYSYLSHVDLVKDLNSGLIGALLVCR |
| A1800- | EGSLAKEKTQTLHKFILLFAVFDEGKSWHSETKNSLMQDRDAASARAWPKMHTVNGYVN |
| F2093- | RSLPGLIGCHRKSVYWHVIGMGTTPEVHSIFLEGHTFLVRNHRQASLEISPITFLTAQTLLMD |
| AE42- | LGQFLLFCHISSHQHDGMLAYVKVDSCPEEPQLRMKNNEEAEDYDDDLTDSEMDVVRFDD |
| S2094- | DNSPSFIQIRSVAKKHPKTWVHYIAAEEEDWDYAPLVLAPDDRSYKSQYLNNGPQRIGRKY |
| V2223- | KKVRFMAYTDETFKTREAIQHESGILGPLLYGEVGDTLLIIFKNQASRPYNIYPHGITDVRPL |
| AE42- | YSRRLPKGVKHLKDFPILPGEIFKYKWTVTVEDGPTKSDPRCLTRYYSSFVNMERDLASGLI |
| N2224- | GPLLICYKESVDQRGNQIMSDKRNVILFSVFDENRSWYLTENIQRFLPNPAGVQLEDPEFQA |
| AE42- | SNIMHSINGYVFDSLQLSVCLHEVAYWYILSIGAQTDFLSVFFSGYTFKHKMVYEDTLTLFP |
| N2225- | FSGETVFMSMENPGLWILGCHNSDFRNRGMTALLKVSSCDKNTGDYYEDSYEDISAYLLS |
| G2278- | KNNAIEPRSFSQNPPVLKRHQREITRTTLQSDQEEIDYDDTISVEMKKEDFDIYDEDENQSPR |
| AE42- | SFQKKTRHYFIAAVERLWDYGMSSSPHVLRNRAQSGSVPQFKKVVFQEFTDGSFTQPLYRG |
| K2279- | ELNEHLGLLGPYIRAEVEDNIMVTFRNQASRPYSFYSSLISYEEDQRQGGGSEPATSGSETPG |
| Y2332) | TSESATPESGPGSEPATSGSETPGSPAGSPTSTEEGTSTEPSEGSAPGSEPATSGSETPGSEPAT |
| | SGSETPGSEPATSGSETPGTSTEPSEGSAPGTSESATPESGPGSEPATSGSETPGTSTEPSEGSA |
| | PGAEPRKNFVKPNETKTYFWKVQHHMAPTKDEFDCKAWAYFSDVDLEKDVHSGLIGPLL |
| | VCHTNTLNPAHGRQVTVQEFALFFTIFDETKSWYFTENMERNCRAPCNIQMEDPTFKENYR |
| | FHAINGYIMDTLPGLVMAQDQRIRWYLLSMGSNENIHSIHFSGHVFTVRKKEEYKMALYNL |
| | YPGVFETVEMLPSKAGIWRVECLIGEHLHAGMSTLFLVYSNKCQTPLGMASGHIRDFQITA |
| | SGQYGQWAPKLARLHYSGSINAWSTKEPFSWIKVDLLAPMIIHGIKTQGARQKFGSEPATS |
| | GSETPGTSESATPESGPGTSTEPSEGSAPGSPAGSPGSSLYISQFIIMYSLDGKKWQTYRGNST |
| | GTLMVFFGNVDSSGIKHNIFNPPIIARYIRLHPTHYSIRSTLRMELMGCDLNSCSMPLGMESK |
| | AISDAQITASSYFTNMFATWSPSKARLHLQGRSNAWRPQVGPAGSPTSTEEGTSTEPSEGSA |
| | PGTSESATPESGPGSEPATSGGNNPKEWLQVDFQKTMKVTGVTTQGVKSLLTSMYVKEFLI |
| | SSSQDGHQWTLFFQNGGTEPSEGSAPGSPAGSPTSTEEGTSESATPESGPGSEPATSGSKVKV |
| | FQGNQDSFTPVVNSLDPPLLTRYLRIHPQSWVHQIALRMEVLGCEAQDLY |
| FVIII BDD2 | ATRRYYLGAVELSWDYMQSDLGELPVDARGPGSSPSASTGTGPGSSPSASTGTGPGTPGSGT |
| (A1-R28- | ASSSPGSSTPSGATGSPGSSPSASTGTGPGASPGTSSTGSPGTPGSGTASSSPGSSTPSGATGSP |
| AG144-F29- | GTPGSGTASSSPGASPGTSSTGSPGASPGTSSTGSPGTPGSGTASSSGFPPRVPKSFPFNTSVVY |
| G244- | KKTLFVEFTVHLFNIAKPRPPWMGLLGPTIQAEVYDTVVITLKNMASHPVSLHAVGVSYWK |
| AG288- | ASEGAEYDDQTSQREKEDDKVFPGGSHTYVWQVLKENGPMASDPLCLTYSYLSHVDLVKD |
| L245- | LNSGLIGALLVCREGSLAKEKTQTLHKFILLFAVFDEGKSWHSETKNSLMQDRDAASARAW |
| R2090- | PKMHTVNGYVNRSLPGGPGASPGTSSTGSPGASPGTSSTGSPGTPGSGTASSSPGSSTPSGAT |
| AG576- | GSPGTPGSGTASSSPGSSTPSGATGSPGTPGSGTASSSPGSSTPSGATGSPGSSTPSGATGSPGS |
| Q2091- | SPSASTGTGPGSSPSASTGTGPGASPGTSSTGSPGTPGSGTASSSPGSSTPSGATGSPGSSPSAS |
| Y2332- | TGTGPGSSPSASTGTGPGASPGTSSTGSPGASPGTSSTGSPGSSTPSGATGSPGSSPSASTGTGP |
| AG864) | GASPGTSSTGSPGSSPSASTGTGPGTPGSGTASSSPGSSTPSGATGSGLIGCHRKSVYWHVIGM |
| | GTTPEVHSIFLEGHTFLVRNHRQASLEISPITFLTAQTLLMDLGQFLLFCHISSHQHDGMEAYV |
| | KVDSCPEEPQLRMKNNEEAEDYDDDLTDSEMDVVRFDDDNSPSFIQIRSVAKKHPKTWVHY |
| | IAAEEEDWDYAPLVLAPDDRSYKSQYLNNGPQRIGRKYKKVRFMAYTDETFKTREAIQHES |
| | GILGPLLYGEVGDTLLIIFKNQASRPYNIYPHGITDVRPLYSRRLPKGVKHLKDFPILPGEIFKY |
| | KWTVTVEDGPTKSDPRCLTRYYSSFVNMERDLASGLIGPLLICYKESVDQRGNQIMSDKRN |
| | VILFSVFDENRSWYLTENIQRFLPNPAGVQLEDPEFQASNIMHSINGYVFDSLQLSVCLHEVA |
| | YWYILSIGAQTDFLSVFFSGYTFKHKMVYEDTLTLFPFSGETVFMSMENPGLWILGCHNSDF |
| | RNRGMTALLKVSSCDKNTGDYYEDSYEDISAYLLSKNNAIEPRSFSQNPPVLKRHQREITRTT |
| | LQSDQEEIDYDDTISVEMKKEDFDIYDEDENQSPRSFQKKTRHYFIAAVERLWDYGMSSSPH |
| | VLRNRAQSGSVPQFKKVVFQEFTDGSFTQPLYRGELNEHLGLLGPYIRAEVEDNIMVTFRNQ |
| | ASRPYSFYSSLISYEEDQRQGAEPRKNFVKPNETKTYFWKVQHHMAPTKDEFDCKAWAYFS |
| | DVDLEKDVHSGLIGPLLVCHTNTLNPAHGRQVTVQEFALFFTIFDETKSWYFTENMERNCRA |
| | PCNIQMEDPTFKENYRFHAGINGYIMDTLPGLVMAQDQRIRWYLLSMGSNENIHSIHFSGHV |
| | FTVRKKEEYKMALYNLYPGVFETVEMLPSKAGIWRVECLIGEHLHAGMSTLFLVYSNKCQT |
| | PLGMASGHIRDFQITASGQYGQWAPKLARLHYSGSINAWSTKEPFSWIKVDLLAPMIIHGIKT |
| | QGARGSPAGSPTSTEEGTSESATPESGPGTSTEPSEGSAPGSPAGSPTSTEEGTSTEPSEGSAPG |
| | TSTEPSEGSAPGTSESATPESGPGSEPATSGSETPGSEPATSGSETPGSPAGSPTSTEEGTSESAT |
| | PESGPGTSTEPSEGSAPGTSTEPSEGSAPGSPAGSPTSTEEGTSTEPSEGSAPGTSTEPSEGSAPG |
| | TSESATPESGPGTSTEPSEGSAPGTSESATPESGPGSEPATSGSETPGTSTEPSEGSAPGTSTEPS |
| | EGSAPGTSESATPESGPGTSESATPESGPGSPAGSPTSTEEGTSESATPESGPGSEPATSGSETP |
| | GTSESATPESGPGTSTEPSEGSAPGTSTEPSEGSAPGTSTEPSEGSAPGTSTEPSEGSAPGTSTEP |
| | SEGSAPGTSTEPSEGSAPGSPAGSPTSTEEGTSTEPSEGSAPGTSESATPESGPGSEPATSGSETP |
| | GTSESATPESGPGSEPATSGSETPGTSESATPESGPGTSTEPSEGSAPGTSESATPESGPGSPAG |
| | SPTSTEEGSPAGSPTSTEEGSPAGSPTSTEEGTSESATPESGPGTSTEPSEGSAPGQKFSSLYISQ |
| | FIIMYSLDGKKWQTYRGNSTGTLMVFFGNVDSSGIKHNIFNPPIIARYIRLHPTHYSIRSTLRM |
| | ELMGCDLNSCSMPLGMESKAISDAQITASSYFTNMFATWSPSKARLHLQGRSNAWRPQVNN |
| | PKEWLQVDFQKTMKVTGVTTQGVKSLLTSMYVKEFLISSSQDGHQWTLFFQNGKVKVFQG |
| | NQDSFTPVVNSLDPPLLTRYLRIHPQSWVHQIALRMEVLGCEAQDLYGGSPAGSPTSTEEGT |
| | SESATPESGPGTSTEPSEGSAPGSPAGSPTSTEEGTSTEPSEGSAPGTSTEPSEGSAPGTSESATP |
| | ESGPGSEPATSGSETPGSEPATSGSETPGSPAGSPTSTEEGTSESATPESGPGTSTEPSEGSAPGT |
| | STEPSEGSAPGSPAGSPTSTEEGTSTEPSEGSAPGTSTEPSEGSAPGTSESATPESGPGTSTEPSE |
| | GSAPGTSESATPESGPGSEPATSGSETPGTSTEPSEGSAPGTSTEPSEGSAPGTSESATPESGPG |
| | TSESATPESGPGSPAGSPTSTEEGTSESATPESGPGSEPATSGSETPGTSESATPESGPGTSTEPS |
| | EGSAPGTSTEPSEGSAPGTSTEPSEGSAPGTSTEPSEGSAPGTSTEPSEGSAPGTSTEPSEGSAP |
| | GSPAGSPTSTEEGTSTEPSEGSAPGTSESATPESGPGSEPATSGSETPGTSESATPESGPGSEPAT |
| | SGSETPGTSESATPESGPGTSTEPSEGSAPGTSESATPESGPGSPAGSPTSTEEGSPAGSPTSTEE |
| | GSPAGSPTSTEEGTSESATPESGPGTSTEPSEGSAPGTSESATPESGPGSEPATSGSETPGTSESA |
| | TPESGPGSEPATSGSETPGTSESATPESGPGTSTEPSEGSAPGSPAGSPTSTEEGTSESATPESGP |
| | GSEPATSGSETPGTSESATPESGPGSPAGSPTSTEEGSPAGSPTSTEEGTSTEPSEGSAPGTSESA |
| | TPESGPGTSESATPESGPGTSESATPESGPGSEPATSGSETPGSEPATSGSETPGSPAGSPTSTEE |
| | GTSTEPSEGSAPGTSTEPSEGSAPGSEPATSGSETPGTSESATPESGPGTSTEPSEGSAP |
| FVIII | ATRRYYLGAVELSWDYMQSDLGELPVDARFPPRVPKSFPFNTSVVYKKTLFVEFTDHLFNIA |
| (A1-T1651- | KPRPPWMGLLGPTIQAEVYDTVVITLKNMASHPVSLHAVGVSYWKASEGAEYDDQTSQRE |
| AG576- | KEDDKVFPGGSHTYVWQVLKENGPMASDPLCLTYSYLSHVDLVKDLNSGLIGALLVCREGS |
| R1652- | LAKEKTQTLHKFILLFAVFDEGKSWHSETKNSLMQDRDAASARAWPKMHTVNGYVNRSLP |
| K1808- | GLIGCHRKSVYWHVIGMGTTPEVHSIFLEGHTFLVRNHRQASLEISPITFLTAQTLLMDLGQF |
| AG144- | LLFCHISSHQHDGMEAYVKVDSCPEEPQLRMKNNEEAEDYDDDLTDSEMDVVRFDDDNSP |
| P1809- | SFIQIRSVAKKHPKTWVHYIAAEEEDWDYAPLVLAPDDRSYKSQYLNNGPQRIGRKYKKVR |
| F2093- | FMAYTDETFKTREAIQHESGILGPLLYGEVGDTLLIIFKNQASRPYNIYPHGITDVRPLYSRRL |
| AG288- | PKGVKHLKDFPILPGEIFKYKWTVTVEDGPTKSDPRCLTRYYSSFVNMERDLASGLIGPLLIC |
| S2094- | YKESVDQRGNQIMSDKRNVILFSVFDENRSWYLTENIQRFLPNPAGVQLEDPEFQASNIMHSI |
| Y2332) | NGYVFDSLQLSVCLHEVAYWYILSIGAQTDFLSVFFSGYTFKHKMVYEDTLTLFPFSGETVF |
| | MSMENPGLWILGCHNSDFRNRGMTALLKVSSCDKNTGDYYEDSYEDISAYLLSKNNAIEPR |
| | SFSQNSRHPSTRQKQFNATTIPENDIEKTDPWFAHRTPMPKIQNVSSSDLLMLLRQSPTPHGL |
| | SLSDLQEAKYETFSDDPSPGAIDSNNSLSEMTHFRPQLHHSGDMVFTPESGLQLRLNEKLGTT |
| | AATELKKLDFKVSSTSNNLISTIPSDNLAAGTDNTSSLGPPSMPVHYDSQLDTTLFGKKSSPLT |
| | ESGGPLSLSEENNDSKLLESGLMNSQESSWGKNVSSTESGRLFKGKRAHGPALLTKDNALFK |
| | VSISLLKTNKTSNNSATNRKTHIDGPSLLIENSPSVWQNILESDTEFKKVTPLIHDRMLMDKN |
| | ATALRLNHMSNKTTSSKNMEMVQQKKEGPIPPDAQNPDMSFFKMLFLPESARWIQRTHGK |
| | NSLNSGQGPSPKQLVSLGPEKSVEGQNFLSEKNKVVVGKGEFTKDVGLKEMVFPSSRNLFLT |
| | NLDNLHENNTHNQEKKIQEEIEKKETLIQENVVLPQIHTVTGTKNFMKNLFLLSTRQNVEGS |
| | YDGAYAPVLQDFRSLNDSTNRTKKHTAHFSKKGEEENLEGLGNQTKQIVEKYACTTRISPNT |
| | SQQNFVTQRSKRALKQFRLPLEETELEKRIIVDDTSTQWSKNMKHLTPSTLTQIDYNEKEKG |
| | AITQSPLSDCLTRSHSIPQANRSPLPIAKVSSFPSIRPIYLTRVLFQDNSSHLPAASYRKKDSGV |
| | QESSHFLQGAKKNNLSLAILTLEMTGDQREVGSLGTSATNSVTYKKVENTVLPKPDLPKTSG |
| | KVELLPKVHIYQKDLFPTETSNGSPGHLDLVEGSLLQGTEGAIKWNEANRPGKVPFLRVATE |
| | SSAKTPSKLLDPLAWDNHYGTQIPKEEWKSQEKSPEKTAFKKKDTILSLNACESNHAIAAINE |
| | GQNKPEIEVTWAKQGRTERLCSQNPPVLKRHQREITGPGTPGSGTASSSPGSSTPSGATGSPG |
| | SSPSASTGTGPGSSPSASTGTGPGSSTPSGATGSPGSSTPSGATGSPGASPGTSSTGSPGASPGT |
| | SSTGSPGASPGTSSTGSPGTPGSGTASSSPGASPGTSSTGSPGASPGTSSTGSPGASPGTSSTGS |
| | PGSSPSASTGTGPGTPGSGTASSSPGASPGTSSTGSPGASPGTSSTGSPGASPGTSSTGSPGSST |
| | PSGATGSPGSSTPSGATGSPGASPGTSSTGSPGTPGSGTASSSPGSSTPSGATGSPGSSTPSGAT |
| | GSPGSSTPSGATGSPGSSPSASTGTGPGASPGTSSTGSPGASPGTSSTGSPGTPGSGTASSSPGA |
| | SPGTSSTGSPGASPGTSSTGSPGASPGTSSTGSPGASPGTSSTGSPGTPGSGTASSSPGSSTPSG |
| | ATGSPGTPGSGTASSSPGSSTPSGATGSPGTPGSGTASSSPGSSTPSGATGSPGSSTPSGATGSP |
| | GSSPSASTGTGPGSSPSASTGTGPGASPGTSSTGSPGTPGSGTASSSPGSSTPSGATGSPGSSPS |
| | ASTGTGPGSSPSASTGTGPGASPGTSSTGSSGRTTLQSDQEEIDYDDTISVEMKKEDFDIYDED |
| | ENQSPRSFQKKTRHYFIAAVERLWDYGMSSSPHVLRNRAQSGSVPQFKKVVFQEFTDGSFT |
| | QPLYRGELNEHLGLLGPYIRAEVEDNIMVTFRNQASRPYSFYSSLISYEEDQRQGAEPRKNFV |
| | KGSGTASSSPGSSTPSGATGSPGTPGSGTASSSPGSSTPSGATGSPGSSTPSGATGSPGSSPSAS |
| | TGTGPGSSPSASTGTGPGASPGTSSTGSPGTPGSGTASSSPGSSTPSGATGSPGSSPSASTGTGP |
| | GSSPSASTGTGPGASPGPNETKTYFWKVQHHMAPTKDEFDCKAWAYFSDVDLEKDVHSGLI |
| | GPLLVCHTNTLNPAHGRQVTVQEFALFFTIFDETKSWYFTENMERNCRAPCNIQMEDPTFKE |
| | NYRFHAINGYIMDTLPGLVMAQDQRIRWYLLSMGSNENIHSIHFSGHVFTVRKKEEYKMAL |
| | YNLYPGVFETVEMLPSKAGIWRVECLIGEHLHAGMSTLFLVYSNKCQTPLGMASGHIRDFQI |
| | TASGQYGQWAPKLARLHYSGSINAWSTKEPFSWIKVDLLAPMIIHGIKTQGARQKFGPGASP |
| | GTSSTGSPGASPGTSSTGSPGTPGSGTASSSPGSSTPSGATGSPGTPGSGTASSSPGSSTPSGAT |
| | GSPGTPGSGTASSSPGSSTPSGATGSPGSSTPSGATGSPGSSPSASTGTGPGSSPSASTGTGPGA |
| | SPGTSSTGSPGTPGSGTASSSPGSSTPSGATGSPGSSPSASTGTGPGSSPSASTGTGPGASPGTS |
| | STGSPGASPGTSSTGSPGSSTPSGATGSPGSSPSASTGTGPGASPGTSSTGSPGSSPSASTGTGP |
| | GTPGSGTASSSPGSSTPSGATGSGSSLYISQFIIMYSLDGKKWQTYRGNSTGTLMVFFGNVDS |
| | SGIKHNIFNPPIIARYIRLHPTHYSIRSTLRMELMGCDLNSCSMPLGMESKAISDAQITASSYFT |
| | NMFATWSPSKARLHLQGRSNAWRPQVNNPKEWLQVDFQKTMKVTGVTTQGVKSLLTSMY |
| | VKEFLISSSQDGHQWTLFFQNGKVKVFQGNQDSFTPVVNSLDPPLLTRYLRIHPQSWVHQIA |
| | LRMEVLGCEAQDLY |
| FVIII BDD2 | ATRRYYLGAVELSWDYMQSDLGELPVDAGGAPSPSASTGTGPGTPGSGTASSSPGSSTPSGA |
| (A1-A28- | TGSPGPSGPGRFPPRVPKSFPFNTSVVYKKTLFVEFTVHLFNIAKPRPPWMGLLGPTIQAEVY |
| AG42-F29- | DTVVITLKNMASHPVSLHAVGVSYWKASEGAEYDDQTSQREKEGGPGTPGSGTASSSPGSS |
| E124- | TPSGATGSPGSSPSASTGTGPGASPGDDKVFPGGSHTYVWQVLKENGPMASDPLCLTYSYLS |
| AG42- | HVDLVKDLNSGLIGALLVCREGSLAKEKTQTLHKFILLFAVFDEGGSPSASTGTGPGASPGTS |
| D125-E124- | STGSPGTPGSGTASSSPGSSTPSGAGKSWHSETKNSLMQDRDAASARAWPKMHTVNGYVNS |
| AG42- | SLPGLIGCHRKSVYWHVIGMGTTPEVHSIFLEGHTFLVRNHRQASLEISPITFLTAQTLLMDL |
| D125-P333- | GQFLLFCHISSHQHDGMEAYVKVDSCPEEPGSASTGTGPGASPGTSSTGSPGTPGSGTASSSP |
| AG42- | GSSTPSGATGGQLRMKNNEEAEDYDDDLTDSEMDVVRFDDDNSPSFIQIRSVAKKHPKTWV |
| Q334- | HYIAAEEEDWDYAPLVLAPDDRSYKSQYLNNGPQRIGRKYKKVRFMAYTDETFKTREAIQH |
| Y2332) | ESGILGPLLYGEVGDTLLIIFKNQASRPYNIYPHGITDVRPLYSRRLPKGVKHLKDFPILPGEIF |
| | KYKWTVTVEDGPTKSDPRCLTRYYSSFVNMERDLASGLIGPLLICYKESVDQRGNQIMSDK |
| | RNVILFSVFDENRSWYLTENIQRFLPNPAGVQLEDPEFQASNIMHSINGYVFDSLQLSVCLHE |
| | VAYWYILSIGAQTDFLSVFFSGYTFKHKMVYEDTLTLFPFSGETVFMSMENPGLWILGCHNS |
| | DFRNRGMTALLKVSSCDKNTGDYYEDSYEDISAYLLSKNNAIEPRSFSQNPPVLKRHQREIT |
| | RTTLQSDQEEIDYDDTISVEMKKEDFDIYDEDENQSPRSFQKKTRHYFIAAVERLWDYGMSS |
| | SPHVLRNRAQSGSVPQFKKVVFQEFTDGSFTQPLYRGELNEHLGLLGPYIRAEVEDNIMVTF |
| | RNQASRPYSFYSSLISYEEDQRQGAEPRKNFVKPNETKTYFWKVQHHMAPTKDEFDCKAW |
| | AYFSDVDLEKDVHSGLIGPLLVCHTNTLNPAHGRQVTVQEFALFFTIFDETKSWYFTENMER |
| | NCRAPCNIQMEDPTFKENYRFHAINGYIMDTLPGLVMAQDQRIRWYLLSMGSNENIHSIHFS |
| | GHVFTVRKKEEYKMALYNLYPGVFETVEMLPSKAGIWRVECLIGEHLHAGMSTLFLVYSNK |
| | CQTPLGMASGHIRDFQITASGQYGQWAPKLARLHYSGSINAWSTKEPFSWIKVDLLAPMIIH |
| | GIKTQGARQKFSSLYISQFIIMYSLDGKKWQTYRGNSTGTLMVFFGNVDSSGIKHNIFNPPIIA |
| | RYIRLHPTHYSIRSTLRMELMGCDLNSCSMPLGMESKAISDAQITASSYFTNMFATWTPSKA |
| | RLHLQGRSNAWRPQVNNPKEWLQVDFQKTMKVTGVTTQGVKSLLTSMYVKEFLISSSQDG |
| | HQWTLFFQNGKVKVFQGNQDSFTPVVNSLDPPLLTRYLRIHPQSWVHQIALRMEVLGCEAQ |
| | DLY |
| FVIII | ATRRYYLGAVELSWDYMQSDLGELPVDARFPPRVPKSFPFNTSVVYKKTLFVEFTDHLFNIA |
| (A1-D345- | KPRPPWMGLLGPTIQAEVYDTVVITLKNMASHPVSLHAVGVSYWKASEGAEYDDQTSQRE |
| AE144- | KEDDKVFPGGSHTYVWQVLKENGPMASDPLCLTYSYLSHVDLVKDLNSGLIGALLVCREGS |
| Y346- | LAKEKTQTLHKFILLFAVFDEGKSWHSETKNSLMQDRDAASARAWPKMHTVNGYVNRSLP |
| D403- | GLIGCHRKSVYWHVIGMGTTPEVHSIFLEGHTFLVRNHRQASLEISPITFLTAQTLLMDLGQF |
| AE144- | LLFCHISSHQHDGMEAYVKVDSCPEEPQLRMKNNEEAEDGGSEPATSGSETPGTSESATPES |
| R405- | GPGSEPATSGSETPGSPAGSPTSTEEGTSTEPSEGSAPGSEPATSGSETPGSEPATSGSETPGSEP |
| R1797- | ATSGSETPGTSTEPSEGSAPGTSESATPESGPGSEPATSGSETPGTSTEPSEGSAPGYDDDLTDS |
| AE288- | EMDVVRFDDDNSPSFIQIRSVAKKHPKTWVHYIAAEEEDWDYAPLVLAPDDGGTSTPESGS |
| Q1798- | ASPGTSPSGESSTAPGTSPSGESSTAPGSTSSTAESPGPGSTSESPSGTAPGSTSSTAESPGPGTS |
| Y2322) | PSGESSTAPGTSTPESGSASPGSTSSTAESPGPGTSPSGESSTAPGTSPSGESSTAPGTSPSGESS |
| | TAPGRSYKSQYLNNGPQRIGRKYKKVRFMAYTDETFKTREAIQHESGILGPLLYGEVGDTLL |
| | IIFKNQASRPYNIYPHGITDVRPLYSRRLPKGVKHLKDFPILPGEIFKYKWTVTVEDGPTKSDP |
| | RCLTRYYSSFVNMERDLASGLIGPLLICYKESVDQRGNQIMSDKRNVILFSVFDENRSWYLT |
| | ENIQRFLPNPAGVQLEDPEFQASNIMHSINGYVFDSLQLSVCLHEVAYWYILSIGAQTDFLSV |
| | FFSGYTFKHKMVYEDTLTLFPFSGETVFMSMENPGLWILGCHNSDFRNRGMTALLKVSSCD |
| | KNTGDYYEDSYEDISAYLLSKNNAIEPRSFSQNSRHPSTRQKQFNATTIPENDIEKTDPWFAH |
| | RTPMPKIQNVSSSDLLMLLRQSPTPHGLSLSDLQEAKYETFSDDPSPGAIDSNNSLSEMTHFR |
| | PQLHHSGDMVFTPESGLQLRLNEKLGTTAATELKKLDFKVSSTSNNLISTIPSDNLAAGTDNT |
| | SSLGPPSMPVHYDSQLDTTLFGKKSSPLTESGGPLSLSEENNDSKLLESGLMNSQESSWGKN |
| | VSSTESGRLFKGKRAHGPALLTKDNALFKVSISLLKTNKTSNNSATNRKTHIDGPSLLIENSPS |
| | VWQNILESDTEFKKVTPLIHDRMLMDKNATALRLNHMSNKTTSSKNMEMVQQKKEGPIPP |
| | DAQNPDMSFFKMLFLPESARWIQRTHGKNSLNSGQGPSPKQLVSLGPEKSVEGQNFLSEKN |
| | KVVVGKGEFTKDVGLKEMVFPSSRNLFLTNLDNLHENNTHNQEKKIQEEIEKKETLIQENVV |
| | LPQIHTVTGTKNFMKNLFLLSTRQNVEGSYDGAYAPVLQDFRSLNDSTNRTKKHTAHFSKK |
| | GEEENLEGLGNQTKQIVEKYACTTRISPNTSQQNFVTQRSKRALKQFRLPLEETELEKRIIVD |
| | DTSTQWSKNMKHLTPSTLTQIDYNEKEKGAITQSPLSDCLTRSHSIPQANRSPLPIAKVSSFPSI |
| | RPIYLTRVLFQDNSSHLPAASYRKKDSGVQESSHFLQGAKKNNLSLAILTLEMTGDQREVGS |
| | LGTSATNSVTYKKVENTVLPKPDLPKTSGKVELLPKVHIYQKDLFPTETSNGSPGHLDLVEG |
| | SLLQGTEGAIKWNEANRPGKVPFLRVATESSAKTPSKLLDPLAWDNHYGTQIPKEEWKSQE |
| | KSPEKTAFKKKDTILSLNACESNHAIAAINEGQNKPEIEVTWAKQGRTERLCSQNPPVLKRH |
| | QREITRTTLQSDQEEIDYDDTISVEMKKEDFDIYDEDENQSPRSFQKKTRHYFIAAVERLWDY |
| | GMSSSPHVLRNRAQSGSVPQFKKVVFQEFTDGSFTQPLYRGELNEHLGLLGPYIRAEVEDNI |
| | MVTFRNQASRPYSFYSSLISYEEDQRGGTSESATPESGPGSEPATSGSETPGTSESATPESGPG |
| | SEPATSGSETPGTSESATPESGPGTSTEPSEGSAPGSPAGSPTSTEEGTSESATPESGPGSEPATS |
| | GSETPGTSESATPESGPGSPAGSPTSTEEGSPAGSPTSTEEGTSTEPSEGSAPGTSESATPESGPG |
| | TSESATPESGPGTSESATPESGPGSEPATSGSETPGSEPATSGSETPGSPAGSPTSTEEGTSTEPS |
| | EGSAPGTSTEPSEGSAPGSEPATSGSETPGTSESATPESGPGTSTEPSEGSAPGQGAEPRKNFV |
| | KPNETKTYFWKVQHHMAPTKDEFDCKAWAYFSDVDLEKDVHSGLIGPLLVCHTNTLNPAH |
| | GRQVTVQEFALFFTIFDETKSWYFTENMERNCRAPCNIQMEDPTFKENYRFHAINGYIMDTL |
| | PGLVMAQDQRIRWYLLSMGSNENIHSIHFSGHVFTVRKKEEYKMALYNLYPGVFETVEMLP |
| | SKAGIWRVECLIGEHLHAGMSTLFLVYSNKCQTPLGMASGHIRDFQITASGQYGQWAPKLA |
| | RLHYSGSINAWSTKEPFSWIKVDLLAPMIIHGIKTQGARQKFSSLYISQFIIMYSLDGKKWQT |
| | YRGNSTGTLMVFFGNVDSSGIKHNIFNPPIIARYIRLHPTHYSIRSTLRMELMGCDLNSCSMPL |
| | GMESKAISDAQITASSYFTNMFATWSPSKARLHLQGRSNAWRPQVNNPKEWLQVDFQKTM |
| | KVTGVTTQGVKSLLTSMYVKEFLISSSQDGHQWTLFFQNGKVKVFQGNQDSFTPVVNSLDP |
| | PLLTRYLRIHPQSWVHQIALRMEVLGCEAQDLY |
| FVIII (A1- | ATRRYYLGAVELSWDYMQSDLGELPVDARFPPRVPKSFPFNTSVVYKKTLFVEFTVHLFNIA |
| N745)- | KPRPPWMGLLGPTIQAEVYDTVVITLKNMASHPVSLHAVGVSYWKASEGAEYDDQTSQRE |
| AE864- | KEDDKVFPGGSHTYVWQVLKENGPMASDPLCLTYSYLSHVDLVKDLNSGLIGALLVCREGS |
| (P1640- | LAKEKTQTLHKFILLFAVFDEGKSWHSETKNSLMQDRDAASARAWPKMHTVNGYVNRSLP |
| Y2332) | GLIGCHRKSVYWHVIGMGTTPEVHSIFLEGHTFLVRNHRQASLEISPITFLTAQTLLMDLGQF |
| | LLFCHISSHQHDGMEAYVKVDSCPEEPQLRMKNNEEAEDYDDDLTDSEMDVVRFDDDNSP |
| | SFIQIRSVAKKHPKTWVHYIAAEEEDWDYAPLVLAPDDRSYKSQYLNNGPQRIGRKYKKVR |
| | FMAYTDETFKTREAIQHESGILGPLLYGEVGDTLLIIFKNQASRPYNIYPHGITDVRPLYSRRL |
| | PKGVKHLKDFPILPGEIFKYKWTVTVEDGPTKSDPRCLTRYYSSFVNMERDLASGLIGPLLIC |
| | YKESVDQRGNQIMSDKRNVILFSVFDENRSWYLTENIQRFLPNPAGVQLEDPEFQASNIMHSI |
| | NGYVFDSLQLSVCLHEVAYWYILSIGAQTDFLSVFFSGYTFKHKMVYEDTLTLFPFSGETVF |
| | MSMENPGLWILGCHNSDFRNRGMTALLKVSSCDKNTGDYYEDSYEDISAYLLSKNNAIEPR |
| | SFSQNGGSPAGSPTSTEEGTSESATPESGPGTSTEPSEGSAPGSPAGSPTSTEEGTSTEPSEGSA |
| | PGTSTEPSEGSAPGTSESATPESGPGSEPATSGSETPGSEPATSGSETPGSPAGSPTSTEEGTSES |
| | ATPESGPGTSTEPSEGSAPGTSTEPSEGSAPGSPAGSPTSTEEGTSTEPSEGSAPGTSTEPSEGSA |
| | PGTSESATPESGPGTSTEPSEGSAPGTSESATPESGPGSEPATSGSETPGTSTEPSEGSAPGTSTE |
| | PSEGSAPGTSESATPESGPGTSESATPESGPGSPAGSPTSTEEGTSESATPESGPGSEPATSGSET |
| | PGTSESATPESGPGTSTEPSEGSAPGTSTEPSEGSAPGTSTEPSEGSAPGTSTEPSEGSAPGTSTE |
| | PSEGSAPGTSTEPSEGSAPGSPAGSPTSTEEGTSTEPSEGSAPGTSESATPESGPGSEPATSGSET |
| | PGTSESATPESGPGSEPATSGSETPGTSESATPESGPGTSTEPSEGSAPGTSESATPESGPGSPA |
| | GSPTSTEEGSPAGSPTSTEEGSPAGSPTSTEEGTSESATPESGPGTSTEPSEGSAPGTSESATPES |
| | GPGSEPATSGSETPGTSESATPESGPGSEPATSGSETPGTSESATPESGPGTSTEPSEGSAPGSP |
| | AGSPTSTEEGTSESATPESGPGSEPATSGSETPGTSESATPESGPGSPAGSPTSTEEGSPAGSPTS |
| | TEEGTSTEPSEGSAPGTSESATPESGPGTSESATPESGPGTSESATPESGPGSEPATSGSETPGSE |
| | PATSGSETPGSPAGSPTSTEEGTSTEPSEGSAPGTSTEPSEGSAPGSEPATSGSETPGTSESATPE |
| | SGPGTSTEPSEGSAPGPPVLKRHQREITRTTLQSDQEEIDYDDTISVEMKKEDFDIYDEDENQS |
| | PRSFQKKTRHYFIAAVERLWDYGMSSSPHVLRNRAQSGSVPQFKKVVFQEFTDGSFTQPLYR |
| | GELNEHLGLLGPYIRAEVEDNIMVTFRNQASRPYSFYSSLISYEEDQRQGAEPRKNFVKPNET |
| | KTYFWKVQHHMAPTKDEFDCKAWAYFSDVDLEKDVHSGLIGPLLVCHTNTLNPAHGRQVT |
| | VQEFALFFTIFDETKSWYFTENMERNCRAPCNIQMEDPTFKENYRFHAINGYIMDTLPGLVM |
| | AQDQRIRWYLLSMGSNENIHSIHFSGHVFTVRKKEEYKMALYNLYPGVFETVEMLPSKAGI |
| | WRVECLIGEHLHAGMSTLFLVYSNKCQTPLGMASGHIRDFQITASGQYGQWAPKLARLHYS |
| | GSINAWSTKEPFSWIKVDLLAPMIIHGIKTQGARQKFSSLYISQFIIMYSLDGKKWQTYRGNS |
| | TGTLMVFFGNVDSSGIKHNIFNPPIIARYIRLHPTHYSIRSTLRMELMGCDLNSCSMPLGMESK |
| | AISDAQITASSYFTNMFATWSPSKARLHLQGRSNAWRPQVNNPKEWLQVDFQKTMKVTGV |
| | TTQGVKSLLTSMYVKEFLISSSQDGHQWTLFFQNGKVKVFQGNQDSFTPVVNSLDPPLLTRY |
| | LRIHPQSWVHQIALRMEVLGCEAQDLY |
| FVIII BDD9 | ATRRYYLGAVELSWDYMQSDLGELPVDARFPPRVPKSFPFNTSVVYKKTLFVEFTVHLFNIA |
| (A1-N745)- | KPRPPWMGLLGPTIQAEVYDTVVITLKNMASHPVSLHAVGVSYWKASEGAEYDDQTSQRE |
| AE288- | KEDDKVFPGGSHTYVWQVLKENGPMASDPLCLTYSYLSHVDLVKDLNSGLIGALLVCREGS |
| (P1640- | LAKEKTQTLHKFILLFAVFDEGKSWHSETKNSLMQDRDAASARAWPKMHTVNGYVNRSLP |
| Y2332) | GLIGCHRKSVYWHVIGMGTTPEVHSIFLEGHTFLVRNHRQASLEISPITFLTAQTLLMDLGQF |
| | LLFCHISSHQHDGMEAYVKVDSCPEEPQLRMKNNEEAEDYDDDLTDSEMDVVRFDDDNSP |
| | SFIQIRSVAKKHPKTWVHYIAAEEEDWDYAPLVLAPDDRSYKSQYLNNGPQRIGRKYKKVR |
| | FMAYTDETFKTREAIQHESGILGPLLYGEVGDTLLIIFKNQASRPYNIYPHGITDVRPLYSRRL |
| | PKGVKHLKDFPILPGEIFKYKWTVTVEDGPTKSDPRCLTRYYSSFVNMERDLASGLIGPLLIC |
| | YKESVDQRGNQIMSDKRNVILFSVFDENRSWYLTENIQRFLPNPAGVQLEDPEFQASNIMHSI |
| | NGYVFDSLQLSVCLHEVAYWYILSIGAQTDFLSVFFSGYTFKHKMVYEDTLTLFPFSGETVF |
| | MSMENPGLWILGCHNSDFRNRGMTALLKVSSCDKNTGDYYEDSYEDISAYLLSKNNAIEPR |
| | SFSQNGGTSESATPESGPGSEPATSGSETPGTSESATPESGPGSEPATSGSETPGTSESATPESG |
| | PGTSTEPSEGSAPGSPAGSPTSTEEGTSESATPESGPGSEPATSGSETPGTSESATPESGPGSPA |
| | GSPTSTEEGSPAGSPTSTEEGTSTEPSEGSAPGTSESATPESGPGTSESATPESGPGTSESATPES |
| | GPGSEPATSGSETPGSEPATSGSETPGSPAGSPTSTEEGTSTEPSEGSAPGTSTEPSEGSAPGSEP |
| | ATSGSETPGTSESATPESGPGTSTEPSEGSAPGPPVLKRHQREITRTTLQSDQEEIDYDDTISVE |
| | MKKEDFDIYDEDENQSPRSFQKKTRHYFIAAVERLWDYGMSSSPHVLRNRAQSGSVPQFKK |
| | VVFQEFTDGSFTQPLYRGELNEHLGLLGPYIRAEVEDNIMVTFRNQASRPYSFYSSLISYEED |
| | QRQGAEPRKNFVKPNETKTYFWKVQHHMAPTKDEFDCKAWAYFSDVDLEKDVHSGLIGPL |
| | LVCHTNTLNPAHGRQVTVQEFALFFTIFDETKSWYFTENMERNCRAPCNIQMEDPTFKENYR |
| | FHAINGYIMDTLPGLVMAQDQRIRWYLLSMGSNENIHSIHFSGHVFTVRKKEEYKMALYNL |
| | YPGVFETVEMLPSKAGIWRVECLIGEHLHAGMSTLFLVYSNKCQTPLGMASGHIRDFQITAS |
| | GQYGQWAPKLARLHYSGSINAWSTKEPFSWIKVDLLAPMIIHGIKTQGARQKFSSLYISQFII |
| | MYSLDGKKWQTYRGNSTGTLMVFFGNVDSSGIKHNIFNPPIIARYIRLHPTHYSIRSTLRMEL |
| | MGCDLNSCSMPLGMESKAISDAQITASSYFTNMFATWSPSKARLHLQGRSNAWRPQVNNPK |
| | EWLQVDFQKTMKVTGVTTQGVKSLLTSMYVKEFLISSSQDGHQWTLFFQNGKVKVFQGNQ |
| | DSFTPVVNSLDPPLLTRYLRIHPQSWVHQIALRMEVLGCEAQDLY |
| FVIII BDD9 | ATRRYYLGAVELSWDYMQSDLGELPVDARFPPRVPKSFPFNTSVVYKKTLFVEFTVHLFNIA |
| (A1-S743)- | KPRPPWMGLLGPTIQAEVYDTVVITLKNMASHPVSLHAVGVSYWKASEGAEYDDQTSQRE |
| AE288- | KEDDKVFPGGSHTYVWQVLKENGPMASDPLCLTYSYLSHVDLVKDLNSGLIGALLVCREGS |
| (Q1638- | LAKEKTQTLHKFILLFAVFDEGKSWHSETKNSLMQDRDAASARAWPKMHTVNGYVNRSLP |
| Y2332) | GLIGCHRKSVYWHVIGMGTTPEVHSIFLEGHTFLVRNHRQASLEISPITFLTAQTLLMDLGQF |
| | LLFCHISSHQHDGMEAYVKVDSCPEEPQLRMKNNEEAEDYDDDLTDSEMDVVRFDDDNSP |
| | SFIQIRSVAKKHPKTWVHYIAAEEEDWDYAPLVLAPDDRSYKSQYLNNGPQRIGRKYKKVR |
| | FMAYTDETFKTREAIQHESGILGPLLYGEVGDTLLIIFKNQASRPYNIYPHGITDVRPLYSRRL |
| | PKGVKHLKDFPILPGEIFKYKWTVTVEDGPTKSDPRCLTRYYSSFVNMERDLASGLIGPLLIC |
| | YKESVDQRGNQIMSDKRNVILFSVFDENRSWYLTENIQRFLPNPAGVQLEDPEFQASNIMHSI |
| | NGYVFDSLQLSVCLHEVAYWYILSIGAQTDFLSVFFSGYTFKHKMVYEDTLTLFPFSGETVF |
| | MSMENPGLWILGCHNSDFRNRGMTALLKVSSCDKNTGDYYEDSYEDISAYLLSKNNAIEPR |
| | SFSGGTSESATPESGPGSEPATSGSETPGTSESATPESGPGSEPATSGSETPGTSESATPESGPGT |
| | STEPSEGSAPGSPAGSPTSTEEGTSESATPESGPGSEPATSGSETPGTSESATPESGPGSPAGSPT |
| | STEEGSPAGSPTSTEEGTSTEPSEGSAPGTSESATPESGPGTSESATPESGPGTSESATPESGPGS |
| | EPATSGSETPGSEPATSGSETPGSPAGSPTSTEEGTSTEPSEGSAPGTSTEPSEGSAPGSEPATSG |
| | SETPGTSESATPESGPGTSTEPSEGSAPGQNPPVLKRHQREITRTTLQSDQEEIDYDDTISVEM |
| | KKEDFDIYDEDENQSPRSFQKKTRHYFIAAVERLWDYGMSSSPHVLRNRAQSGSVPQFKKV |
| | VFQEFTDGSFTQPLYRGELNEHLGLLGPYIRAEVEDNIMVTFRNQASRPYSFYSSLISYEEDQ |
| | RQGAEPRKNFVKPNETKTYFWKVQHHMAPTKDEFDCKAWAYFSDVDLEKDVHSGLIGPLL |
| | VCHTNTLNPAHGRQVTVQEFALFFTIFDETKSWYFTENMERNCRAPCNIQMEDPTFKENYRF |
| | HAINGYIMDTLPGLVMAQDQRIRWYLLSMGSNENIHSIHFSGHVFTVRKKEEYKMALYNLY |
| | PGVFETVEMLPSKAGIWRVECLIGEHLHAGMSTLFLVYSNKCQTPLGMASGHIRDFQITASG |
| | QYGQWAPKLARLHYSGSINAWSTKEPFSWIKVDLLAPMIIHGIKTQGARQKFSSLYISQFIIM |
| | YSLDGKKWQTYRGNSTGTLMVFFGNVDSSGIKHNIFNPPIIARYIRLHPTHYSIRSTLRMELM |
| | GCDLNSCSMPLGMESKAISDAQITASSYFTNMFATWSPSKARLHLQGRSNAWRPQVNNPKE |
| | WLQVDFQKTMKVTGVTTQGVKSLLTSMYVKEFLISSSQDGHQWTLFFQNGKVKVFQGNQD |
| | SFTPVVNSLDPPLLTRYLRIHPQSWVHQIALRMEVLGCEAQDLY |
| FVIII BDD9 | ATRRYYLGAVELSWDYMQSDLGELPVDARFPPRVPKSFPFNTSVVYKKTLFVEFTVHLFNIA |
| (A1-N745)- | KPRPPWMGLLGPTIQAEVYDTVVITLKNMASHPVSLHAVGVSYWKASEGAEYDDQTSQRE |
| AG288_2- | KEDDKVFPGGSHTYVWQVLKENGPMASDPLCLTYSYLSHVDLVKDLNSGLIGALLVCREGS |
| (P1640- | LAKEKTQTLHKFILLFAVFDEGKSWHSETKNSLMQDRDAASARAWPKMHTVNGYVNRSLP |
| Y2332)- | GLIGCHRKSVYWHVIGMGTTPEVHSIFLEGHTFLVRNHRQASLEISPITFLTAQTLLMDLGQF |
| AG288_2 | LLFCHISSHQHDGMEAYVKVDSCPEEPQLRMKNNEEAEDYDDDLTDSEMDVVRFDDDNSP |
| | SFIQIRSVAKKHPKTWVHYIAAEEEDWDYAPLVLAPDDRSYKSQYLNNGPQRIGRKYKKVR |
| | FMAYTDETFKTREAIQHESGILGPLLYGEVGDTLLIIFKNQASRPYNIYPHGITDVRPLYSRRL |
| | PKGVKHLKDFPILPGEIFKYKWTVTVEDGPTKSDPRCLTRYYSSFVNMERDLASGLIGPLLIC |
| | YKESVDQRGNQIMSDKRNVILFSVFDENRSWYLTENIQRFLPNPAGVQLEDPEFQASNIMHSI |
| | NGYVFDSLQLSVCLHEVAYWYILSIGAQTDFLSVFFSGYTFKHKMVYEDTLTLFPFSGETVF |
| | MSMENPGLWILGCHNSDFRNRGMTALLKVSSCDKNTGDYYEDSYEDISAYLLSKNNAIEPR |
| | SFSQNGPGASPGTSSTGSPGASPGTSSTGSPGTPGSGTASSSPGSSTPSGATGSPGTPGSGTASS |
| | SPGSSTPSGATGSPGTPGSGTASSSPGSSTPSGATGSPGSSTPSGATGSPGSSPSASTGTGPGSSP |
| | SASTGTGPGASPGTSSTGSPGTPGSGTASSSPGSSTPSGATGSPGSSPSASTGTGPGSSPSASTG |
| | TGPGASPGTSSTGSPGASPGTSSTGSPGSSTPSGATGSPGSSPSASTGTGPGASPGTSSTGSPGS |
| | SPSASTGTGPGTPGSGTASSSPGSSTPSGATGSGPPVLKRHQREITRTTLQSDQEEIDYDDTISV |
| | EMKKEDFDIYDEDENQSPRSFQKKTRHYFIAAVERLWDYGMSSSPHVLRNRAQSGSVPQFK |
| | KVVFQEFTDGSFTQPLYRGELNEHLGLLGPYIRAEVEDNIMVTFRNQASRPYSFYSSLISYEE |
| | DQRQGAEPRKNFVKPNETKTYFWKVQHHMAPTKDEFDCKAWAYFSDVDLEKDVHSGLIGP |
| | LLVCHTNTLNPAHGRQVTVQEFALFFTIFDETKSWYFTENMERNCRAPCNIQMEDPTFKENY |
| | RFHAINGYIMDTLPGLVMAQDQRIRWYLLSMGSNENIHSIHFSGHVFTVRKKEEYKMALYN |
| | LYPGVFETVEMLPSKAGIWRVECLIGEHLHAGMSTLFLVYSNKCQTPLGMASGHIRDFQITA |
| | SGQYGQWAPKLARLHYSGSINAWSTKEPFSWIKVDLLAPMIIHGIKTQGARQKFSSLYISQFII |
| | MYSLDGKKWQTYRGNSTGTLMVFFGNVDSSGIKHNIFNPPIIARYIRLHPTHYSIRSTLRMEL |
| | MGCDLNSCSMPLGMESKAISDAQITASSYFTNMFATWSPSKARLHLQGRSNAWRPQVNNPK |
| | EWLQVDFQKTMKVTGVTTQGVKSLLTSMYVKEFLISSSQDGHQWTLFFQNGKVKVFQGNQ |
| | DSFTPVVNSLDPPLLTRYLRIHPQSWVHQIALRMEVLGCEAQDLYGAGSPGAETAPGASPGT |
| | SSTGSPGASPGTSSTGSPGTPGSGTASSSPGSSTPSGATGSPGTPGSGTASSSPGSSTPSGATGS |
| | PGTPGSGTASSSPGSSTPSGATGSPGSSTPSGATGSPGSSPSASTGTGPGSSPSASTGTGPGASP |
| | GTSSTGSPGTPGSGTASSSPGSSTPSGATGSPGSSPSASTGTGPGSSPSASTGTGPGASPGTSST |
| | GSPGASPGTSSTGSPGSSTPSGATGSPGSSPSASTGTGPGASPGTSSTGSPGSSPSASTGTGPGT |
| | PGSGTASSSPGSSTPSGATGSGAETAEQKLISEEDLSPATG |
| FVIII BDD9 | ATRRYYLGAVELSWDYMQSDLGELPVDARFPPRVPKSFPFNTSVVYKKTLFVEFTVHLFNIA |
| (A1-S743)- | KPRPPWMGLLGPTIQAEVYDTVVITLKNMASHPVSLHAVGVSYWKASEGAEYDDQTSQRE |
| AG288_2- | KEDDKVFPGGSHTYVWQVLKENGPMASDPLCLTYSYLSHVDLVKDLNSGLIGALLVCREGS |
| (Q1638- | LAKEKTQTLHKFILLFAVFDEGKSWHSETKNSLMQDRDAASARAWPKMHTVNGYVNRSLP |
| Y2332)- | GLIGCHRKSVYWHVIGMGTTPEVHSIFLEGHTFLVRNHRQASLEISPITFLTAQTLLMDLGQF |
| AG288_2 | LLFCHISSHQHDGMEAYVKVDSCPEEPQLRMKNNEEAEDYDDDLTDSEMDVVRFDDDNSP |
| | SFIQIRSVAKKHPKTWVHYIAAEEEDWDYAPLVLAPDDRSYKSQYLNNGPQRIGRKYKKVR |
| | FMAYTDETFKTREAIQHESGILGPLLYGEVGDTLLIIFKNQASRPYNIYPHGITDVRPLYSRRL |
| | PKGVKHLKDFPILPGEIFKYKWTVTVEDGPTKSDPRCLTRYYSSFVNMERDLASGLIGPLLIC |
| | YKESVDQRGNQIMSDKRNVILFSVFDENRSWYLTENIQRFLPNPAGVQLEDPEFQASNIMHSI |
| | NGYVFDSLQLSVCLHEVAYWYILSIGAQTDFLSVFFSGYTFKHKMVYEDTLTLFPFSGETVF |
| | MSMENPGLWILGCHNSDFRNRGMTALLKVSSCDKNTGDYYEDSYEDISAYLLSKNNAIEPR |
| | SFSGPGASPGTSSTGSPGASPGTSSTGSPGTPGSGTASSSPGSSTPSGATGSPGTPGSGTASSSP |
| | GSSTPSGATGSPGTPGSGTASSSPGSSTPSGATGSPGSSTPSGATGSPGSSPSASTGTGPGSSPS |
| | ASTGTGPGASPGTSSTGSPGTPGSGTASSSPGSSTPSGATGSPGSSPSASTGTGPGSSPSASTGT |
| | GPGASPGTSSTGSPGASPGTSSTGSPGSSTPSGATGSPGSSPSASTGTGPGASPGTSSTGSPGSS |
| | PSASTGTGPGTPGSGTASSSPGSSTPSGATGSGQNPPVLKRHQREITRTTLQSDQEEIDYDDTI |
| | SVEMKKEDFDIYDEDENQSPRSFQKKTRHYFIAAVERLWDYGMSSSPHVLRNRAQSGSVPQ |
| | FKKVVFQEFTDGSFTQPLYRGELNEHLGLLGPYIRAEVEDNIMVTFRNQASRPYSFYSSLISY |
| | EEDQRQGAEPRKNFVKPNETKTYFWKVQHHMAPTKDEFDCKAWAYFSDVDLEKDVHSGLI |
| | GPLLVCHTNTLNPAHGRQVTVQEFALFFTIFDETKSWYFTENMERNCRAPCNIQMEDPTFKE |
| | NYRFHAINGYIMDTLPGLVMAQDQRIRWYLLSMGSNENIHSIHFSGHVFTVRKKEEYKMAL |
| | YNLYPGVFETVEMLPSKAGIWRVECLIGEHLHAGMSTLFLVYSNKCQTPLGMASGHIRDFQI |
| | TASGQYGQWAPKLARLHYSGSINAWSTKEPFSWIKVDLLAPMIIHGIKTQGARQKFSSLYISQ |
| | FIIMYSLDGKKWQTYRGNSTGTLMVFFGNVDSSGIKHNIFNPPIIARYIRLHPTHYSIRSTLRM |
| | ELMGCDLNSCSMPLGMESKAISDAQITASSYFTNMFATWSPSKARLHLQGRSNAWRPQVNN |
| | PKEWLQVDFQKTMKVTGVTTQGVKSLLTSMYVKEFLISSSQDGHQWTLFFQNGKVKVFQG |
| | NQDSFTPVVNSLDPPLLTRYLRIHPQSWVHQIALRMEVLGCEAQDLYGAGSPGAETAPGASP |
| | GTSSTGSPGASPGTSSTGSPGTPGSGTASSSPGSSTPSGATGSPGTPGSGTASSSPGSSTPSGAT |
| | GSPGTPGSGTASSSPGSSTPSGATGSPGSSTPSGATGSPGSSPSASTGTGPGSSPSASTGTGPGA |
| | SPGTSSTGSPGTPGSGTASSSPGSSTPSGATGSPGSSPSASTGTGPGSSPSASTGTGPGASPGTS |
| | STGSPGASPGTSSTGSPGSSTPSGATGSPGSSPSASTGTGPGASPGTSSTGSPGSSPSASTGTGP |
| | GTPGSGTASSSPGSSTPSGATGSGAETAEQKLISEEDLSPATG |
| FVIII | ATRRYYLGAVELSWDYMQSDLGELPVDARFPPRVPKSFPFNTSVVYKKTLFVEFTDHLFNIA |
| BDD10 | KPRPPWMGLLGPTIQAEVYDTVVITLKNMASHPVSLHAVGVSYWKASEGAEYDDQTSQRE |
| (A1-N745)- | KEDDKVFPGGSHTYVWQVLKENGPMASDPLCLTYSYLSHVDLVKDLNSGLIGALLVCREGS |
| AE288- | LAKEKTQTLHKFILLFAVFDEGKSWHSETKNSLMQDRDAASARAWPKMHTVNGYVNRSLP |
| (P1640- | GLIGCHRKSVYWHVIGMGTTPEVHSIFLEGHTFLVRNHRQASLEISPITFLTAQTLLMDLGQF |
| Y2332)- | LLFCHISSHQHDGMEAYVKVDSCPEEPQLRMKNNEEAEDYDDDLTDSEMDVVRFDDDNSP |
| AE288 | SFIQIRSVAKKHPKTWVHYIAAEEEDWDYAPLVLAPDDRSYKSQYLNNGPQRIGRKYKKVR |
| | FMAYTDETFKTREAIQHESGILGPLLYGEVGDTLLIIFKNQASRPYNIYPHGITDVRPLYSRRL |
| | PKGVKHLKDFPILPGEIFKYKWTVTVEDGPTKSDPRCLTRYYSSFVNMERDLASGLIGPLLIC |
| | YKESVDQRGNQIMSDKRNVILFSVFDENRSWYLTENIQRFLPNPAGVQLEDPEFQASNIMHSI |
| | NGYVFDSLQLSVCLHEVAYWYILSIGAQTDFLSVFFSGYTFKHKMVYEDTLTLFPFSGETVF |
| | MSMENPGLWILGCHNSDFRNRGMTALLKVSSCDKNTGDYYEDSYEDISAYLLSKNNAIEPR |
| | SFSQNG□GTSESATPESGPGSEPATSGSETPGTSESATPESGPGSEPATSGSETPGTSESATPES |
| | GPGTSTEPSEGSAPGSPAGSPTSTEEGTSESATPESGPGSEPATSGSETPGTSESATPESGPGSP |
| | AGSPTSTEEGSPAGSPTSTEEGTSTEPSEGSAPGTSESATPESGPGTSESATPESGPGTSESATPE |
| | SGPGSEPATSGSETPGSEPATSGSETPGSPAGSPTSTEEGTSTEPSEGSAPGTSTEPSEGSAPGSE |
| | PATSGSETPGTSESATPESGPGTSTEPSEGSAPGPPVLKRHQAEITRTTLQSDQEEIDYDDTISV |
| | EMKKEDFDIYDEDENQSPRSFQKKTRHYFIAAVERLWDYGMSSSPHVLRNRAQSGSVPQFK |
| | KVVFQEFTDGSFTQPLYRGELNEHLGLLGPYIRAEVEDNIMVTFRNQASRPYSFYSSLISYEE |
| | DQRQGAEPRKNFVKPNETKTYFWKVQHHMAPTKDEFDCKAWAYFSDVDLEKDVHSGLIGP |
| | LLVCHTNTLNPAHGRQVTVQEFALFFTIFDETKSWYFTENMERNCRAPCNIQMEDPTFKENY |
| | RFHAINGYIMDTLPGLVMAQDQRIRWYLLSMGSNENIHSIHFSGHVFTVRKKEEYKMALYN |
| | LYPGVFETVEMLPSKAGIWRVECLIGEHLHAGMSTLFLVYSNKCQTPLGMASGHIRDFQITA |
| | SGQYGQWAPKLARLHYSGSINAWSTKEPFSWIKVDLLAPMIIHGIKTQGARQKFSSLYISQFII |
| | MYSLDGKKWQTYRGNSTGTLMVFFGNVDSSGIKHNIFNPPIIARYIRLHPTHYSIRSTLRMEL |
| | MGCDLNSCSMPLGMESKAISDAQITASSYFTNMFATWSPSKARLHLQGRSNAWRPQVNNPK |
| | EWLQVDFQKTMKVTGVTTQGVKSLLTSMYVKEFLISSSQDGHQWTLFFQNGKVKVFQGNQ |
| | DSFTPVVNSLDPPLLTRYLRIHPQSWVHQIALRMEVLGCEAQDLYGGTSESATPESGPGSEPA |
| | TSGSETPGTSESATPESGPGSEPATSGSETPGTSESATPESGPGTSTEPSEGSAPGSPAGSPTSTE |
| | EGTSESATPESGPGSEPATSGSETPGTSESATPESGPGSPAGSPTSTEEGSPAGSPTSTEEGTSTE |
| | PSEGSAPGTSESATPESGPGTSESATPESGPGTSESATPESGPGSEPATSGSETPGSEPATSGSET |
| | PGSPAGSPTSTEEGTSTEPSEGSAPGTSTEPSEGSAPGSEPATSGSETPGTSESATPESGPGTSTE |
| | PSEGSAP |
| FVIII | ATRRYYLGAVELSWDYMQSDLGELPVDARFPPRVPKSFPFNTSVVYKKTLFVEFTDHLFNIA |
| BDD10 | KPRPPWMGLLGPTIQAEVYDTVVITLKNMASHPVSLHAVGVSYWKASEGAEYDDQTSQRE |
| (A1-S743)- | KEDDKVFPGGSHTYVWQVLKENGPMASDPLCLTYSYLSHVDLVKDLNSGLIGALLVCREGS |
| AE288- | LAKEKTQTLHKFILLFAVFDEGKSWHSETKNSLMQDRDAASARAWPKMHTVNGYVNRSLP |
| (Q1638- | GLIGCHRKSVYWHVIGMGTTPEVHSIFLEGHTFLVRNHRQASLEISPITFLTAQTLLMDLGQF |
| Y2332)- | LLFCHISSHQHDGMEAYVKVDSCPEEPQLRMKNNEEAEDYDDDLTDSEMDVVRFDDDNSP |
| AE288 | SFIQIRSVAKKHPKTWVHYIAAEEEDWDYAPLVLAPDDRSYKSQYLNNGPQRIGRKYKKVR |
| | FMAYTDETFKTREAIQHESGILGPLLYGEVGDTLLIIFKNQASRPYNIYPHGITDVRPLYSRRL |
| | PKGVKHLKDFPILPGEIFKYKWTVTVEDGPTKSDPRCLTRYYSSFVNMERDLASGLIGPLLIC |
| | YKESVDQRGNQIMSDKRNVILFSVFDENRSWYLTENIQRFLPNPAGVQLEDPEFQASNIMHSI |
| | NGYVFDSLQLSVCLHEVAYWYILSIGAQTDFLSVFFSGYTFKHKMVYEDTLTLFPFSGETVF |
| | MSMENPGLWILGCHNSDFRNRGMTALLKVSSCDKNTGDYYEDSYEDISAYLLSKNNAIEPR |
| | SFSGGTSESATPESGPGSEPATSGSETPGTSESATPESGPGSEPATSGSETPGTSESATPESGPGT |
| | STEPSEGSAPGSPAGSPTSTEEGTSESATPESGPGSEPATSGSETPGTSESATPESGPGSPAGSPT |
| | STEEGSPAGSPTSTEEGTSTEPSEGSAPGTSESATPESGPGTSESATPESGPGTSESATPESGPGS |
| | EPATSGSETPGSEPATSGSETPGSPAGSPTSTEEGTSTEPSEGSAPGTSTEPSEGSAPGSEPATSG |
| | SETPGTSESATPESGPGTSTEPSEGSAPGQNPPVLKRHQAEITRTTLQSDQEEIDYDDTISVEM |
| | KKEDFDIYDEDENQSPRSFQKKTRHYFIAAVERLWDYGMSSSPHVLRNRAQSGSVPQFKKV |
| | VFQEFTDGSFTQPLYRGELNEHLGLLGPYIRAEVEDNIMVTFRNQASRPYSFYSSLISYEEDQ |
| | RQGAEPRKNFVKPNETKTYFWKVQHHMAPTKDEFDCKAWAYFSDVDLEKDVHSGLIGPLL |
| | VCHTNTLNPAHGRQVTVQEFALFFTIFDETKSWYFTENMERNCRAPCNIQMEDPTFKENYRF |
| | HAINGYIMDTLPGLVMAQDQRIRWYLLSMGSNENIHSIHFSGHVFTVRKKEEYKMALYNLY |
| | PGVFETVEMLPSKAGIWRVECLIGEHLHAGMSTLFLVYSNKCQTPLGMASGHIRDFQITASG |
| | QYGQWAPKLARLHYSGSINAWSTKEPFSWIKVDLLAPMIIHGIKTQGARQKFSSLYISQFIIM |
| | YSLDGKKWQTYRGNSTGTLMVFFGNVDSSGIKHNIFNPPIIARYIRLHPTHYSIRSTLRMELM |
| | GCDLNSCSMPLGMESKAISDAQITASSYFTNMFATWSPSKARLHLQGRSNAWRPQVNNPKE |
| | WLQVDFQKTMKVTGVTTQGVKSLLTSMYVKEFLISSSQDGHQWTLFFQNGKVKVFQGNQD |
| | SFTPVVNSLDPPLLTRYLRIHPQSWVHQIALRMEVLGCEAQDLYGGTSESATPESGPGSEPAT |
| | SGSETPGTSESATPESGPGSEPATSGSETPGTSESATPESGPGTSTEPSEGSAPGSPAGSPTSTEE |
| | GTSESATPESGPGSEPATSGSETPGTSESATPESGPGSPAGSPTSTEEGSPAGSPTSTEEGTSTEP |
| | SEGSAPGTSESATPESGPGTSESATPESGPGTSESATPESGPGSEPATSGSETPGSEPATSGSETP |
| | GSPAGSPTSTEEGTSTEPSEGSAPGTSTEPSEGSAPGSEPATSGSETPGTSESATPESGPGTSTEP |
| | SEGSAP |
| FVIII | ATRRYYLGAVELSWDYMQSDLGELPVDARFPPRVPKSFPFNTSVVYKKTLFVEFTDHLFNIA |
| BDD10 | KPRPPWMGLLGPTIQAEVYDTVVITLKNMASHPVSLHAVGVSYWKASEGAEYDDQTSQRE |
| (A1-N745)- | KEDDKVFPGGSHTYVWQVLKENGPMASDPLCLTYSYLSHVDLVKDLNSGLIGALLVCREGS |
| AG288_2- | LAKEKTQTLHKFILLFAVFDEGKSWHSETKNSLMQDRDAASARAWPKMHTVNGYVNRSLP |
| (P1640- | GLIGCHRKSVYWHVIGMGTTPEVHSIFLEGHTFLVRNHRQASLEISPITFLTAQTLLMDLGQF |
| Y2332)- | LLFCHISSHQHDGMEAYVKVDSCPEEPQLRMKNNEEAEDYDDDLTDSEMDVVRFDDDNSP |
| AG288_2 | SFIQIRSVAKKHPKTWVHYIAAEEEDWDYAPLVLAPDDRSYKSQYLNNGPQRIGRKYKKVR |
| | FMAYTDETFKTREAIQHESGILGPLLYGEVGDTLLIIFKNQASRPYNIYPHGITDVRPLYSRRL |
| | PKGVKHLKDFPILPGEIFKYKWTVTVEDGPTKSDPRCLTRYYSSFVNMERDLASGLIGPLLIC |
| | YKESVDQRGNQIMSDKRNVILFSVFDENRSWYLTENIQRFLPNPAGVQLEDPEFQASNIMHSI |
| | NGYVFDSLQLSVCLHEVAYWYILSIGAQTDFLSVFFSGYTFKHKMVYEDTLTLFPFSGETVF |
| | MSMENPGLWILGCHNSDFRNRGMTALLKVSSCDKNTGDYYEDSYEDISAYLLSKNNAIEPR |
| | SFSQNGPGASPGTSSTGSPGASPGTSSTGSPGTPGSGTASSSPGSSTPSGATGSPGTPGSGTASS |
| | SPGSSTPSGATGSPGTPGSGTASSSPGSSTPSGATGSPGSSTPSGATGSPGSSPSASTGTGPGSSP |
| | SASTGTGPGASPGTSSTGSPGTPGSGTASSSPGSSTPSGATGSPGSSPSASTGTGPGSSPSASTG |
| | TGPGASPGTSSTGSPGASPGTSSTGSPGSSTPSGATGSPGSSPSASTGTGPGASPGTSSTGSPGS |
| | SPSASTGTGPGTPGSGTASSSPGSSTPSGATGSPPVLKRHQAEITRTTLQSDQEEIDYDDTISVE |
| | MKKEDFDIYDEDENQSPRSFQKKTRHYFIAAVERLWDYGMSSSPHVLRNRAQSGSVPQFKK |
| | VVFQEFTDGSFTQPLYRGELNEHLGLLGPYIRAEVEDNIMVTFRNQASRPYSFYSSLISYEED |
| | QRQGAEPRKNFVKPNETKTYFWKVQHHMAPTKDEFDCKAWAYFSDVDLEKDVHSGLIGPL |
| | LVCHTNTLNPAHGRQVTVQEFALFFTIFDETKSWYFTENMERNCRAPCNIQMEDPTFKENYR |
| | FHAINGYIMDTLPGLVMAQDQRIRWYLLSMGSNENIHSIHFSGHVFTVRKKEEYKMALYNL |
| | YPGVFETVEMLPSKAGIWRVECLIGEHLHAGMSTLFLVYSNKCQTPLGMASGHIRDFQITAS |
| | GQYGQWAPKLARLHYSGSINAWSTKEPFSWIKVDLLAPMIIHGIKTQGARQKFSSLYISQFII |
| | MYSLDGKKWQTYRGNSTGTLMVFFGNVDSSGIKHNIFNPPIIARYIRLHPTHYSIRSTLRMEL |
| | MGCDLNSCSMPLGMESKAISDAQITASSYFTNMFATWSPSKARLHLQGRSNAWRPQVNNPK |
| | EWLQVDFQKTMKVTGVTTQGVKSLLTSMYVKEFLISSSQDGHQWTLFFQNGKVKVFQGNQ |
| | DSFTPVVNSLDPPLLTRYLRIHPQSWVHQIALRMEVLGCEAQDLYGAGSPGAETAPGASPGT |
| | SSTGSPGASPGTSSTGSPGTPGSGTASSSPGSSTPSGATGSPGTPGSGTASSSPGSSTPSGATGS |
| | PGTPGSGTASSSPGSSTPSGATGSPGSSTPSGATGSPGSSPSASTGTGPGSSPSASTGTGPGASP |
| | GTSSTGSPGTPGSGTASSSPGSSTPSGATGSPGSSPSASTGTGPGSSPSASTGTGPGASPGTSST |
| | GSPGASPGTSSTGSPGSSTPSGATGSPGSSPSASTGTGPGASPGTSSTGSPGSSPSASTGTGPGT |
| | PGSGTASSSPGSSTPSGATGSGAETAEQKLISEEDLSPATG |
| FVIII | ATRRYYLGAVELSWDYMQSDLGELPVDARFPPRVPKSFPFNTSVVYKKTLFVEFTDHLFNIA |
| BDD10 | KPRPPWMGLLGPTIQAEVYDTVVITLKNMASHPVSLHAVGVSYWKASEGAEYDDQTSQRE |
| (A1-S743)- | KEDDKVFPGGSHTYVWQVLKENGPMASDPLCLTYSYLSHVDLVKDLNSGLIGALLVCREGS |
| AG288_2- | LAKEKTQTLHKFILLFAVFDEGKSWHSETKNSLMQDRDAASARAWPKMHTVNGYVNRSLP |
| (Q1638- | GLIGCHRKSVYWHVIGMGTTPEVHSIFLEGHTFLVRNHRQASLEISPITFLTAQTLLMDLGQF |
| Y2332)- | LLFCHISSHQHDGMEAYVKVDSCPEEPQLRMKNNEEAEDYDDDLTDSEMDVVRFDDDNSP |
| AG288_2 | SFIQIRSVAKKHPKTWVHYIAAEEEDWDYAPLVLAPDDRSYKSQYLNNGPQRIGRKYKKVR |
| | FMAYTDETFKTREAIQHESGILGPLLYGEVGDTLLIIFKNQASRPYNIYPHGITDVRPLYSRRL |
| | PKGVKHLKDFPILPGEIFKYKWTVTVEDGPTKSDPRCLTRYYSSFVNMERDLASGLIGPLLIC |
| | YKESVDQRGNQIMSDKRNVILFSVFDENRSWYLTENIQRFLPNPAGVQLEDPEFQASNIMHSI |
| | NGYVFDSLQLSVCLHEVAYWYILSIGAQTDFLSVFFSGYTFKHKMVYEDTLTLFPFSGETVF |
| | MSMENPGLWILGCHNSDFRNRGMTALLKVSSCDKNTGDYYEDSYEDISAYLLSKNNAIEPR |
| | SFSGPGASPGTSSTGSPGASPGTSSTGSPGTPGSGTASSSPGSSTPSGATGSPGTPGSGTASSSP |
| | GSSTPSGATGSPGTPGSGTASSSPGSSTPSGATGSPGSSTPSGATGSPGSSPSASTGTGPGSSPS |
| | ASTGTGPGASPGTSSTGSPGTPGSGTASSSPGSSTPSGATGSPGSSPSASTGTGPGSSPSASTGT |
| | GPGASPGTSSTGSPGASPGTSSTGSPGSSTPSGATGSPGSSPSASTGTGPGASPGTSSTGSPGSS |
| | PSASTGTGPGTPGSGTASSSPGSSTPSGATGSQNPPVLKRHQAEITRTTLQSDQEEIDYDDTIS |
| | VEMKKEDFDIYDEDENQSPRSFQKKTRHYFIAAVERLWDYGMSSSPHVLRNRAQSGSVPQF |
| | KKVVFQEFTDGSFTQPLYRGELNEHLGLLGPYIRAEVEDNIMVTFRNQASRPYSFYSSLISYE |
| | EDQRQGAEPRKNFVKPNETKTYFWKVQHHMAPTKDEFDCKAWAYFSDVDLEKDVHSGLI |
| | GPLLVCHTNTLNPAHGRQVTVQEFALFFTIFDETKSWYFTENMERNCRAPCNIQMEDPTFKE |
| | NYRFHAINGYIMDTLPGLVMAQDQRIRWYLLSMGSNENIHSIHFSGHVFTVRKKEEYKMAL |
| | YNLYPGVFETVEMLPSKAGIWRVECLIGEHLHAGMSTLFLVYSNKCQTPLGMASGHIRDFQI |
| | TASGQYGQWAPKLARLHYSGSINAWSTKEPFSWIKVDLLAPMIIHGIKTQGARQKFSSLYISQ |
| | FIIMYSLDGKKWQTYRGNSTGTLMVFFGNVDSSGIKHNIFNPPIIARYIRLHPTHYSIRSTLRM |
| | ELMGCDLNSCSMPLGMESKAISDAQITASSYFTNMFATWSPSKARLHLQGRSNAWRPQVNN |
| | PKEWLQVDFQKTMKVTGVTTQGVKSLLTSMYVKEFLISSSQDGHQWTLFFQNGKVKVFQG |
| | NQDSFTPVVNSLDPPLLTRYLRIHPQSWVHQIALRMEVLGCEAQDLYGAGSPGAETAPGASP |
| | GTSSTGSPGASPGTSSTGSPGTPGSGTASSSPGSSTPSGATGSPGTPGSGTASSSPGSSTPSGAT |
| | GSPGTPGSGTASSSPGSSTPSGATGSPGSSTPSGATGSPGSSPSASTGTGPGSSPSASTGTGPGA |
| | SPGTSSTGSPGTPGSGTASSSPGSSTPSGATGSPGSSPSASTGTGPGSSPSASTGTGPGASPGTS |
| | STGSPGASPGTSSTGSPGSSTPSGATGSPGSSPSASTGTGPGASPGTSSTGSPGSSPSASTGTGP |
| | GTPGSGTASSSPGSSTPSGATGSGAETAEQKLISEEDLSPATG |

*Sequence name reflects N- to C-terminus configuration of the FVIII segments (amino acid spanning numbers relative to mature sequence) and XTEN components

TABLE 30
Exemplary CFXTEN comprising FVIII, cleavage sequences and XTEN sequences

| CFXTEN | |
|---|---|
| Name* | Amino Acid Sequence |
| SP-AE288- | MQIELSTCFFLCLLRFCFSGTSESATPESGPGSEPATSGSETPGTSESATPESGPGSEPATSGSETP |
| CS-L- | GTSESATPESGPGTSTEPSEGSAPGSPAGSPTSTEEGTSESATPESGPGSEPATSGSETPGTSESA |
| (FVIII_1- | TPESGPGSPAGSPTSTEEGSPAGSPTSTEEGTSTEPSEGSAPGTSESATPESGPGTSESATPESGP |
| 745)- | GTSESATPESGPGSEPATSGSETPGSEPATSGSETPGSPAGSPTSTEEGTSTEPSEGSAPGTSTEPS |
| AE288- | EGSAPGSEPATSGSETPGTSESATPESGPGTSTEPSEGSAPQSPRSFQGPEGPSATRRYYLGAVE |
| (FVIII_1686- | LSWDYMQSDLGELPVDARFPPRVPKSFPFNTSVVYKKTLFVEFTVHLFNIAKPRPPWMGLLG |
| 2332)-L- | PTIQAEVYDTVVITLKNMASHPVSLHAVGVSYWKASEGAEYDDQTSQREKEDDKVFPGGSH |
| CS-AE288 | TYVWQVLKENGPMASDPLCLTYSYLSHVDLVKDLNSGLIGALLVCREGSLAKEKTQTLHKFI |
| | LLFAVFDEGKSWHSETKNSLMQDRDAASARAWPKMHTVNGYVNRSLPGLIGCHRKSVYWH |
| | VIGMGTTPEVHSIFLEGHTFLVRNHRQASLEISPITFLTAQTLLMDLGQFLLFCHISSHQHDGM |
| | EAYVKVDSCPEEPQLRMKNNEEAEDYDDDLTDSEMDVVRFDDDNSPSFIQIRSVAKKHPKT |
| | WVHYIAAEEEDWDYAPLVLAPDDRSYKSQYLNNGPQRIGRKYKKVRFMAYTDETFKTREAI |
| | QHESGILGPLLYGEVGDTLLIIFKNQASRPYNIYPHGITDVRPLYSRRLPKGVKHLKDFPILPGEI |
| | FKYKWTVTVEDGPTKSDPRCLTRYYSSFVNMERDLASGLIGPLLICYKESVDQRGNQIMSDK |
| | RNVILFSVFDENRSWYLTENIQRFLPNPAGVQLEDPEFQASNIMHSINGYVFDSLQLSVCLHEV |
| | AYWYILSIGAQTDFLSVFFSGYTFKHKMVYEDTLTLFPFSGETVFMSMENPGLWILGCHNSDF |
| | RNRGMTALLKVSSCDKNTGDYYEDSYEDISAYLLSKNNAIEPRSFSQNGTSESATPESGPGSEP |
| | ATSGSETPGTSESATPESGPGSEPATSGSETPGTSESATPESGPGTSTEPSEGSAPGSPAGSPTST |
| | EEGTSESATPESGPGSEPATSGSETPGTSESATPESGPGSPAGSPTSTEEGSPAGSPTSTEEGTST |
| | EPSEGSAPGTSESATPESGPGTSESATPESGPGTSESATPESGPGSEPATSGSETPGSEPATSGSE |
| | TPGSPAGSPTSTEEGTSTEPSEGSAPGTSTEPSEGSAPGSEPATSGSETPGTSESATPESGPGTST |
| | EPSEGSAPQSPRSFQKKTRHYFIAAVERLWDYGMSSSPHVLRNRAQSGSVPQFKKVVFQEFTD |
| | GSFTQPLYRGELNEHLGLLGPYIRAEVEDNIMVTFRNQASRPYSFYSSLISYEEDQRQGAEPRK |
| | NFVKPNETKTYFWKVQHHMAPTKDEFDCKAWAYFSDVDLEKDVHSGLIGPLLVCHTNTLNP |
| | AHGRQVTVQEFALFFTIFDETKSWYFTENMERNCRAPCNIQMEDPTFKENYRFHAINGYIMD |
| | TLPGLVMAQDQRIRWYLLSMGSNENIHSIHFSGHVFTVRKKEEYKMALYNLYPGVFETVEML |
| | PSKAGIWRVECLIGEHLHAGMSTLFLVYSNKCQTPLGMASGHIRDFQITASGQYGQWAPKLA |
| | RLHYSGSINAWSTKEPFSWIKVDLLAPMIIHGIKTQGARQKFSSLYISQFIIMYSLDGKKWQTY |
| | RGNSTGTLMVFFGNVDSSGIKHNIFNPPIIARYIRLHPTHYSIRSTLRMELMGCDLNSCSMPLG |
| | MESKAISDAQITASSYFTNMFATWSPSKARLHLQGRSNAWRPQVNNPKEWLQVDFQKTMKV |
| | TGVTTQGVKSLLTSMYVKEFLISSSQDGHQWTLFFQNGKVKVFQGNQDSFTPVVNSLDPPLL |
| | TRYLRIHPQSWVHQIALRMEVLGCEAQDLYGPEGPSQSPRSFQGTSESATPESGPGSEPATSGS |
| | ETPGTSESATPESGPGSEPATSGSETPGTSESATPESGPGTSTEPSEGSAPGSPAGSPTSTEEGTS |
| | ESATPESGPGSEPATSGSETPGTSESATPESGPGSPAGSPTSTEEGSPAGSPTSTEEGTSTEPSEGS |
| | APGTSESATPESGPGTSESATPESGPGTSESATPESGPGSEPATSGSETPGSEPATSGSETPGSPA |
| | GSPTSTEEGTSTEPSEGSAPGTSTEPSEGSAPGSEPATSGSETPGTSESATPESGPGTSTEPSEGS |
| | AP |
| SP-AE576- | MQIELSTCFFLCLLRFCFSGSPAGSPTSTEEGTSESATPESGPGTSTEPSEGSAPGSPAGSPTSTEE |
| CS-L- | GTSTEPSEGSAPGTSTEPSEGSAPGTSESATPESGPGSEPATSGSETPGSEPATSGSETPGSPAGS |
| (FVIII_1- | PTSTEEGTSESATPESGPGTSTEPSEGSAPGTSTEPSEGSAPGSPAGSPTSTEEGTSTEPSEGSAP |
| 745)- | GTSTEPSEGSAPGTSESATPESGPGTSTEPSEGSAPGTSESATPESGPGSEPATSGSETPGTSTEPS |
| AE576- | EGSAPGTSTEPSEGSAPGTSESATPESGPGTSESATPESGPGSPAGSPTSTEEGTSESATPESGPG |
| (FVIII_1686- | SEPATSGSETPGTSESATPESGPGTSTEPSEGSAPGTSTEPSEGSAPGTSTEPSEGSAPGTSTEPSE |
| 2332)-L- | GSAPGTSTEPSEGSAPGTSTEPSEGSAPGSPAGSPTSTEEGTSTEPSEGSAPGTSESATPESGPGS |
| CS-AE288 | EPATSGSETPGTSESATPESGPGSEPATSGSETPGTSESATPESGPGTSTEPSEGSAPGTSESATP |
| | ESGPGSPAGSPTSTEEGSPAGSPTSTEEGSPAGSPTSTEEGTSESATPESGPGTSTEPSEGSAPQS |
| | PRSFQGPSGPATRRYYLGAVELSWDYMQSDLGELPVDARFPPRVPKSFPFNTSVVYKKTLFV |
| | EFTVHLFNIAKPRPPWMGLLGPTIQAEVYDTVVITLKNMASHPVSLHAVGVSYWKASEGAEY |
| | DDQTSQREKEDDKVFPGGSHTYVWQVLKENGPMASDPLCLTYSYLSHVDLVKDLNSGLIGA |
| | LLVCREGSLAKEKTQTLHKFILLFAVFDEGKSWHSETKNSLMQDRDAASARAWPKMHTVNG |
| | YVNRSLPGLIGCHRKSVYWHVIGMGTTPEVHSIFLEGHTFLVRNHRQASLEISPITFLTAQTLL |
| | MDLGQFLLFCHISSHQHDGMEAYVKVDSCPEEPQLRMKNNEEAEDYDDDLTDSEMDVVRFD |
| | DDNSPSFIQIRSVAKKHPKTWVHYIAAEEEDWDYAPLVLAPDDRSYKSQYLNNGPQRIGRKY |
| | KKVRFMAYTDETFKTREAIQHESGILGPLLYGEVGDTLLIIFKNQASRPYNIYPHGITDVRPLY |
| | SRRLPKGVKHLKDFPILPGEIFKYKWTVTVEDGPTKSDPRCLTRYYSSFVNMERDLASGLIGP |
| | LLICYKESVDQRGNQIMSDKRNVILFSVFDENRSWYLTENIQRFLPNPAGVQLEDPEFQASNI |
| | MHSINGYVFDSLQLSVCLHEVAYWYILSIGAQTDFLSVFFSGYTFKHKMVYEDTLTLFPFSGE |
| | TVFMSMENPGLWILGCHNSDFRNRGMTALLKVSSCDKNTGDYYEDSYEDISAYLLSKNNAIE |
| | PRSFSQNGSPAGSPTSTEEGTSESATPESGPGTSTEPSEGSAPGSPAGSPTSTEEGTSTEPSEGSA |
| | PGTSTEPSEGSAPGTSESATPESGPGSEPATSGSETPGSEPATSGSETPGSPAGSPTSTEEGTSES |
| | ATPESGPGTSTEPSEGSAPGTSTEPSEGSAPGSPAGSPTSTEEGTSTEPSEGSAPGTSTEPSEGSA |
| | PGTSESATPESGPGTSTEPSEGSAPGTSESATPESGPGSEPATSGSETPGTSTEPSEGSAPGTSTEP |
| | SEGSAPGTSESATPESGPGTSESATPESGPGSPAGSPTSTEEGTSESATPESGPGSEPATSGSETP |
| | GTSESATPESGPGTSTEPSEGSAPGTSTEPSEGSAPGTSTEPSEGSAPGTSTEPSEGSAPGTSTEPS |
| | EGSAPGTSTEPSEGSAPGSPAGSPTSTEEGTSTEPSEGSAPGTSESATPESGPGSEPATSGSETPG |
| | TSESATPESGPGSEPATSGSETPGTSESATPESGPGTSTEPSEGSAPGTSESATPESGPGSPAGSP |
| | TSTEEGSPAGSPTSTEEGSPAGSPTSTEEGTSESATPESGPGTSTEPSEGSAPQSPRSFQKKTRHY |
| | FIAAVERLWDYGMSSSPHVLRNRAQSGSVPQFKKVVFQEFTDGSFTQPLYRGELNEHLGLLG |
| | PYIRAEVEDNIMVTFRNQASRPYSFYSSLISYEEDQRQGAEPRKNFVKPNETKTYFWKVQHH |
| | MAPTKDEFDCKAWAYFSDVDLEKDVHSGLIGPLLVCHTNTLNPAHGRQVTVQEFALFFTIFD |
| | ETKSWYFTENMERNCRAPCNIQMEDPTFKENYRFHAINGYIMDTLPGLVMAQDQRIRWYLLS |
| | MGSNENIHSIHFSGHVFTVRKKEEYKMALYNLYPGVFETVEMLPSKAGIWRVECLIGEHLHA |
| | GMSTLFLVYSNKCQTPLGMASGHIRDFQITASGQYGQWAPKLARLHYSGSINAWSTKEPFSW |
| | IKVDLLAPMIIHGIKTQGARQKFSSLYISQFIIMYSLDGKKWQTYRGNSTGTLMVFFGNVDSSG |
| | IKHNIFNPPIIARYIRLHPTHYSIRSTLRMELMGCDLNSCSMPLGMESKAISDAQITASSYFTNM |
| | FATWSPSKARLHLQGRSNAWRPQVNNPKEWLQVDFQKTMKVTGVTTQGVKSLLTSMYVKE |
| | FLISSSQDGHQWTLFFQNGKVKVFQGNQDSFTPVVNSLDPPLLTRYLRIHPQSWVHQIALRME |
| | VLGCEAQDLYGPEGPSQSPRSFQGTSESATPESGPGSEPATSGSETPGTSESATPESGPGSEPAT |
| | SGSETPGTSESATPESGPGTSTEPSEGSAPGSPAGSPTSTEEGTSESATPESGPGSEPATSGSETP |
| | GTSESATPESGPGSPAGSPTSTEEGSPAGSPTSTEEGTSTEPSEGSAPGTSESATPESGPGTSESA |
| | TPESGPGTSESATPESGPGSEPATSGSETPGSEPATSGSETPGSPAGSPTSTEEGTSTEPSEGSAP |
| | GTSTEPSEGSAPGSEPATSGSETPGTSESATPESGPGTSTEPSEGSAP |
| SP- | MQIELSTCFFLCLLRFCFSATRRYYLGAVELSWDYMQSDLGELPVDARFPPRVPKSFPFNTSV |
| (FVIII_1- | VYKKTLFVEFTVHLFNIAKPRPPWMGLLGPTIQAEVYDTVVITLKNMASHPVSLHAVGVSYW |
| 745)- | KASEGAEYDDQTSQREKEDDKVFPGGSHTYVWQVLKENGPMASDPLCLTYSYLSHVDLVK |
| AE576- | DLNSGLIGALLVCREGSLAKEKTQTLHKFILLFAVFDEGKSWHSETKNSLMQDRDAASARAW |
| (FVIII_1686- | PKMHTVNGYVNRSLPGLIGCHRKSVYWHVIGMGTTPEVHSIFLEGHTFLVRNHRQASLEISPI |
| 2332)-L- | TFLTAQTLLMDLGQFLLFCHISSHQHDGMEAYVKVDSCPEEPQLRMKNNEEAEDYDDDLTD |
| CS-AE576 | SEMDVVRFDDDNSPSFIQIRSVAKKHPKTWVHYIAAEEEDWDYAPLVLAPDDRSYKSQYLNN |
| | GPQRIGRKYKKVRFMAYTDETFKTREAIQHESGILGPLLYGEVGDTLLIIFKNQASRPYNIYPH |
| | GITDVRPLYSRRLPKGVKHLKDFPILPGEIFKYKWTVTVEDGPTKSDPRCLTRYYSSFVNMER |
| | DLASGLIGPLLICYKESVDQRGNQIMSDKRNVILFSVFDENRSWYLTENIQRFLPNPAGVQLED |
| | PEFQASNIMHSINGYVFDSLQLSVCLHEVAYWYILSIGAQTDFLSVFFSGYTFKHKMVYEDTL |
| | TLFPFSGETVFMSMENPGLWILGCHNSDFRNRGMTALLKVSSCDKNTGDYYEDSYEDISAYL |
| | LSKNNAIEPRSFSQNGSPAGSPTSTEEGTSESATPESGPGTSTEPSEGSAPGSPAGSPTSTEEGTS |
| | TEPSEGSAPGTSTEPSEGSAPGTSESATPESGPGSEPATSGSETPGSEPATSGSETPGSPAGSPTS |
| | TEEGTSESATPESGPGTSTEPSEGSAPGTSTEPSEGSAPGSPAGSPTSTEEGTSTEPSEGSAPGTS |
| | TEPSEGSAPGTSESATPESGPGTSTEPSEGSAPGTSESATPESGPGSEPATSGSETPGTSTEPSEGS |
| | APGTSTEPSEGSAPGTSESATPESGPGTSESATPESGPGSPAGSPTSTEEGTSESATPESGPGSEP |
| | ATSGSETPGTSESATPESGPGTSTEPSEGSAPGTSTEPSEGSAPGTSTEPSEGSAPGTSTEPSEGS |
| | APGTSTEPSEGSAPGTSTEPSEGSAPGSPAGSPTSTEEGTSTEPSEGSAPGTSESATPESGPGSEP |
| | ATSGSETPGTSESATPESGPGSEPATSGSETPGTSESATPESGPGTSTEPSEGSAPGTSESATPES |
| | GPGSPAGSPTSTEEGSPAGSPTSTEEGSPAGSPTSTEEGTSESATPESGPGTSTEPSEGSAPQSPR |
| | SFQKKTRHYFIAAVERLWDYGMSSSPHVLRNRAQSGSVPQFKKVVFQEFTDGSFTQPLYRGE |
| | LNEHLGLLGPYIRAEVEDNIMVTFRNQASRPYSFYSSLISYEEDQRQGAEPRKNFVKPNETKT |
| | YFWKVQHHMAPTKDEFDCKAWAYFSDVDLEKDVHSGLIGPLLVCHTNTLNPAHGRQVTVQ |
| | EFALFFTIFDETKSWYFTENMERNCRAPCNIQMEDPTFKENYRFHAINGYIMDTLPGLVMAQD |
| | QRIRWYLLSMGSNENIHSIHFSGHVFTVRKKEEYKMALYNLYPGVFETVEMLPSKAGIWRVE |
| | CLIGEHLHAGMSTLFLVYSNKCQTPLGMASGHIRDFQITASGQYGQWAPKLARLHYSGSINA |
| | WSTKEPFSWIKVDLLAPMIIHGIKTQGARQKFSSLYISQFIIMYSLDGKKWQTYRGNSTGTLM |
| | VFFGNVDSSGIKHNIFNPPIIARYIRLHPTHYSIRSTLRMELMGCDLNSCSMPLGMESKAISDAQ |
| | ITASSYFTNMFATWSPSKARLHLQGRSNAWRPQVNNPKEWLQVDFQKTMKVTGVTTQGVK |
| | SLLTSMYVKEFLISSSQDGHQWTLFFQNGKVKVFQGNQDSFTPVVNSLDPPLLTRYLRIHPQS |
| | WVHQIALRMEVLGCEAQDLYGPEGPSQSPRSFQGSPAGSPTSTEEGTSESATPESGPGTSTEPS |
| | EGSAPGSPAGSPTSTEEGTSTEPSEGSAPGTSTEPSEGSAPGTSESATPESGPGSEPATSGSETPG |
| | SEPATSGSETPGSPAGSPTSTEEGTSESATPESGPGTSTEPSEGSAPGTSTEPSEGSAPGSPAGSP |
| | TSTEEGTSTEPSEGSAPGTSTEPSEGSAPGTSESATPESGPGTSTEPSEGSAPGTSESATPESGPG |
| | SEPATSGSETPGTSTEPSEGSAPGTSTEPSEGSAPGTSESATPESGPGTSESATPESGPGSPAGSP |
| | TSTEEGTSESATPESGPGSEPATSGSETPGTSESATPESGPGTSTEPSEGSAPGTSTEPSEGSAPG |
| | TSTEPSEGSAPGTSTEPSEGSAPGTSTEPSEGSAPGTSTEPSEGSAPGSPAGSPTSTEEGTSTEPSE |
| | GSAPGTSESATPESGPGSEPATSGSETPGTSESATPESGPGSEPATSGSETPGTSESATPESGPGT |
| | STEPSEGSAPGTSESATPESGPGSPAGSPTSTEEGSPAGSPTSTEEGSPAGSPTSTEEGTSESATPE |
| | SGPGTSTEPSEGSAP |
| SP-AE576- | MQIELSTCFFLCLLRFCFSGSPAGSPTSTEEGTSESATPESGPGTSTEPSEGSAPGSPAGSPTSTEE |
| CS-L- | GTSTEPSEGSAPGTSTEPSEGSAPGTSESATPESGPGSEPATSGSETPGSEPATSGSETPGSPAGS |
| (FVIII_1- | PTSTEEGTSESATPESGPGTSTEPSEGSAPGTSTEPSEGSAPGSPAGSPTSTEEGTSTEPSEGSAP |
| 745)- | GTSTEPSEGSAPGTSESATPESGPGTSTEPSEGSAPGTSESATPESGPGSEPATSGSETPGTSTEPS |
| AE576- | EGSAPGTSTEPSEGSAPGTSESATPESGPGTSESATPESGPGSPAGSPTSTEEGTSESATPESGPG |
| (FVIII_168 | SEPATSGSETPGTSESATPESGPGTSTEPSEGSAPGTSTEPSEGSAPGTSTEPSEGSAPGTSTEPSE |
| 6-2332) | GSAPGTSTEPSEGSAPGTSTEPSEGSAPGSPAGSPTSTEEGTSTEPSEGSAPGTSESATPESGPGS |
| | EPATSGSETPGTSESATPESGPGSEPATSGSETPGTSESATPESGPGTSTEPSEGSAPGTSESATP |
| | ESGPGSPAGSPTSTEEGSPAGSPTSTEEGSPAGSPTSTEEGTSESATPESGPGTSTEPSEGSAPQS |
| | PRSFQGPEGPSATRRYYLGAVELSWDYMQSDLGELPVDARFPPRVPKSFPFNTSVVYKKTLF |
| | VEFTVHLFNIAKPRPPWMGLLGPTIQAEVYDTVVITLKNMASHPVSLHAVGVSYWKASEGAE |
| | YDDQTSQREKEDDKVFPGGSHTYVWQVLKENGPMASDPLCLTYSYLSHVDLVKDLNSGLIG |
| | ALLVCREGSLAKEKTQTLHKFILLFAVFDEGKSWHSETKNSLMQDRDAASARAWPKMHTVN |
| | GYVNRSLPGLIGCHRKSVYWHVIGMGTTPEVHSIFLEGHTFLVRNHRQASLEISPITFLTAQTL |
| | LMDLGQFLLFCHISSHQHDGMEAYVKVDSCPEEPQLRMKNNEEAEDYDDDLTDSEMDVVRF |
| | DDDNSPSFIQIRSVAKKHPKTWVHYIAAEEEDWDYAPLVLAPDDRSYKSQYLNNGPQRIGRK |
| | YKKVRFMAYTDETFKTREAIQHESGILGPLLYGEVGDTLLIIFKNQASRPYNIYPHGITDVRPL |
| | YSRRLPKGVKHLKDFPILPGEIFKYKWTVTVEDGPTKSDPRCLTRYYSSFVNMERDLASGLIG |
| | PLLICYKESVDQRGNQIMSDKRNVILFSVFDENRSWYLTENIQRFLPNPAGVQLEDPEFQASNI |
| | MHSINGYVFDSLQLSVCLHEVAYWYILSIGAQTDFLSVFFSGYTFKHKMVYEDTLTLFPFSGE |
| | TVFMSMENPGLWILGCHNSDFRNRGMTALLKVSSCDKNTGDYYEDSYEDISAYLLSKNNAIE |
| | PRSFSQNGSPAGSPTSTEEGTSESATPESGPGTSTEPSEGSAPGSPAGSPTSTEEGTSTEPSEGSA |
| | PGTSTEPSEGSAPGTSESATPESGPGSEPATSGSETPGSEPATSGSETPGSPAGSPTSTEEGTSES |
| | ATPESGPGTSTEPSEGSAPGTSTEPSEGSAPGSPAGSPTSTEEGTSTEPSEGSAPGTSTEPSEGSA |
| | PGTSESATPESGPGTSTEPSEGSAPGTSESATPESGPGSEPATSGSETPGTSTEPSEGSAPGTSTEP |
| | SEGSAPGTSESATPESGPGTSESATPESGPGSPAGSPTSTEEGTSESATPESGPGSEPATSGSETP |
| | GTSESATPESGPGTSTEPSEGSAPGTSTEPSEGSAPGTSTEPSEGSAPGTSTEPSEGSAPGTSTEPS |
| | EGSAPGTSTEPSEGSAPGSPAGSPTSTEEGTSTEPSEGSAPGTSESATPESGPGSEPATSGSETPG |
| | TSESATPESGPGSEPATSGSETPGTSESATPESGPGTSTEPSEGSAPGTSESATPESGPGSPAGSP |
| | TSTEEGSPAGSPTSTEEGSPAGSPTSTEEGTSESATPESGPGTSTEPSEGSAPQSPRSFQKKTRHY |
| | FIAAVERLWDYGMSSSPHVLRNRAQSGSVPQFKKVVFQEFTDGSFTQPLYRGELNEHLGLLG |
| | PYIRAEVEDNIMVTFRNQASRPYSFYSSLISYEEDQRQGAEPRKNFVKPNETKTYFWKVQHH |
| | MAPTKDEFDCKAWAYFSDVDLEKDVHSGLIGPLLVCHTNTLNPAHGRQVTVQEFALFFTIFD |
| | ETKSWYFTENMERNCRAPCNIQMEDPTFKENYRFHAINGYIMDTLPGLVMAQDQRIRWYLLS |
| | MGSNENIHSIHFSGHVFTVRKKEEYKMALYNLYPGVFETVEMLPSKAGIWRVECLIGEHLHA |
| | GMSTLFLVYSNKCQTPLGMASGHIRDFQITASGQYGQWAPKLARLHYSGSINAWSTKEPFSW |
| | IKVDLLAPMIIHGIKTQGARQKFSSLYISQFIIMYSLDGKKWQTYRGNSTGTLMVFFGNVDSSG |
| | IKHNIFNPPIIARYIRLHPTHYSIRSTLRMELMGCDLNSCSMPLGMESKAISDAQITASSYFTNM |
| | FATWSPSKARLHLQGRSNAWRPQVNNPKEWLQVDFQKTMKVTGVTTQGVKSLLTSMYVKE |
| | FLISSSQDGHQWTLFFQNGKVKVFQGNQDSFTPVVNSLDPPLLTRYLRIHPQSWVHQIALRME |
| | VLGCEAQDLY |
| SP-AE576- | MQIELSTCFFLCLLRFCFSGSPAGSPTSTEEGTSESATPESGPGTSTEPSEGSAPGSPAGSPTSTEE |
| CS-L- | GTSTEPSEGSAPGTSTEPSEGSAPGTSESATPESGPGSEPATSGSETPGSEPATSGSETPGSPAGS |
| (FVIII_1- | PTSTEEGTSESATPESGPGTSTEPSEGSAPGTSTEPSEGSAPGSPAGSPTSTEEGTSTEPSEGSAP |
| 743)- | GTSTEPSEGSAPGTSESATPESGPGTSTEPSEGSAPGTSESATPESGPGSEPATSGSETPGTSTEPS |
| AE288- | EGSAPGTSTEPSEGSAPGTSESATPESGPGTSESATPESGPGSPAGSPTSTEEGTSESATPESGPG |
| (FVIII_168 | SEPATSGSETPGTSESATPESGPGTSTEPSEGSAPGTSTEPSEGSAPGTSTEPSEGSAPGTSTEPSE |
| 6-2332)-L- | GSAPGTSTEPSEGSAPGTSTEPSEGSAPGSPAGSPTSTEEGTSTEPSEGSAPGTSESATPESGPGS |
| CS-AE576 | EPATSGSETPGTSESATPESGPGSEPATSGSETPGTSESATPESGPGTSTEPSEGSAPGTSESATP |
| | ESGPGSPAGSPTSTEEGSPAGSPTSTEEGSPAGSPTSTEEGTSESATPESGPGTSTEPSEGSAPIEP |
| | RSPSGSPGATRRYYLGAVELSWDYMQSDLGELPVDARFPPRVPKSFPFNTSVVYKKTLFVEFT |
| | VHLFNIAKPRPPWMGLLGPTIQAEVYDTVVITLKNMASHPVSLHAVGVSYWKASEGAEYDD |
| | QTSQREKEDDKVFPGGSHTYVWQVLKENGPMASDPLCLTYSYLSHVDLVKDLNSGLIGALL |
| | VCREGSLAKEKTQTLHKFILLFAVFDEGKSWHSETKNSLMQDRDAASARAWPKMHTVNGY |
| | VNRSLPGLIGCHRKSVYWHVIGMGTTPEVHSIFLEGHTFLVRNHRQASLEISPITFLTAQTLLM |
| | DLGQFLLFCHISSHQHDGMEAYVKVDSCPEEPQLRMKNNEEAEDYDDDLTDSEMDVVRFDD |
| | DNSPSFIQIRSVAKKHPKTWVHYIAAEEEDWDYAPLVLAPDDRSYKSQYLNNGPQRIGRKYK |
| | KVRFMAYTDETFKTREAIQHESGILGPLLYGEVGDTLLIIFKNQASRPYNIYPHGITDVRPLYSR |
| | RLPKGVKHLKDFPILPGEIFKYKWTVTVEDGPTKSDPRCLTRYYSSFVNMERDLASGLIGPLLI |
| | CYKESVDQRGNQIMSDKRNVILFSVFDENRSWYLTENIQRFLPNPAGVQLEDPEFQASNIMHS |
| | INGYVFDSLQLSVCLHEVAYWYILSIGAQTDFLSVFFSGYTFKHKMVYEDTLTLFPFSGETVF |
| | MSMENPGLWILGCHNSDFRNRGMTALLKVSSCDKNTGDYYEDSYEDISAYLLSKNNAIEPRS |
| | FSGTSESATPESGPGSEPATSGSETPGTSESATPESGPGSEPATSGSETPGTSESATPESGPGTSTE |
| | PSEGSAPGSPAGSPTSTEEGTSESATPESGPGSEPATSGSETPGTSESATPESGPGSPAGSPTSTE |
| | EGSPAGSPTSTEEGTSTEPSEGSAPGTSESATPESGPGTSESATPESGPGTSESATPESGPGSEPA |
| | TSGSETPGSEPATSGSETPGSPAGSPTSTEEGTSTEPSEGSAPGTSTEPSEGSAPGSEPATSGSETP |
| | GTSESATPESGPGTSTEPSEGSAPQSPRSFQKKTRHYFIAAVERLWDYGMSSSPHVLRNRAQS |
| | GSVPQFKKVVFQEFTDGSFTQPLYRGELNEHLGLLGPYIRAEVEDNIMVTFRNQASRPYSFYS |
| | SLISYEEDQRQGAEPRKNFVKPNETKTYFWKVQHHMAPTKDEFDCKAWAYFSDVDLEKDV |
| | HSGLIGPLLVCHTNTLNPAHGRQVTVQEFALFFTIFDETKSWYFTENMERNCRAPCNIQMEDP |
| | TFKENYRFHAINGYIMDTLPGLVMAQDQRIRWYLLSMGSNENIHSIHFSGHVFTVRKKEEYK |
| | MALYNLYPGVFETVEMLPSKAGIWRVECLIGEHLHAGMSTLFLVYSNKCQTPLGMASGHIRD |
| | FQITASGQYGQWAPKLARLHYSGSINAWSTKEPFSWIKVDLLAPMIIHGIKTQGARQKFSSLYI |
| | SQFIIMYSLDGKKWQTYRGNSTGTLMVFFGNVDSSGIKHNIFNPPIIARYIRLHPTHYSIRSTLR |
| | MELMGCDLNSCSMPLGMESKAISDAQITASSYFTNMFATWSPSKARLHLQGRSNAWRPQVN |
| | NPKEWLQVDFQKTMKVTGVTTQGVKSLLTSMYVKEFLISSSQDGHQWTLFFQNGKVKVFQG |
| | NQDSFTPVVNSLDPPLLTRYLRIHPQSWVHQIALRMEVLGCEAQDLYGSPGIEPRSPSGSPAGS |
| | PTSTEEGTSESATPESGPGTSTEPSEGSAPGSPAGSPTSTEEGTSTEPSEGSAPGTSTEPSEGSAP |
| | GTSESATPESGPGSEPATSGSETPGSEPATSGSETPGSPAGSPTSTEEGTSESATPESGPGTSTEPS |
| | EGSAPGTSTEPSEGSAPGSPAGSPTSTEEGTSTEPSEGSAPGTSTEPSEGSAPGTSESATPESGPG |
| | TSTEPSEGSAPGTSESATPESGPGSEPATSGSETPGTSTEPSEGSAPGTSTEPSEGSAPGTSESATP |
| | ESGPGTSESATPESGPGSPAGSPTSTEEGTSESATPESGPGSEPATSGSETPGTSESATPESGPGT |
| | STEPSEGSAPGTSTEPSEGSAPGTSTEPSEGSAPGTSTEPSEGSAPGTSTEPSEGSAPGTSTEPSEG |
| | SAPGSPAGSPTSTEEGTSTEPSEGSAPGTSESATPESGPGSEPATSGSETPGTSESATPESGPGSE |
| | PATSGSETPGTSESATPESGPGTSTEPSEGSAPGTSESATPESGPGSPAGSPTSTEEGSPAGSPTS |
| | TEEGSPAGSPTSTEEGTSESATPESGPGTSTEPSEGSAP |
| SP-AG288- | MQIELSTCFFLCLLRFCFSPGASPGTSSTGSPGASPGTSSTGSPGTPGSGTASSSPGSSTPSGATG |
| CS-L- | SPGTPGSGTASSSPGSSTPSGATGSPGTPGSGTASSSPGSSTPSGATGSPGSSTPSGATGSPGSSP |
| (FVIII_1- | SASTGTGPGSSPSASTGTGPGASPGTSSTGSPGTPGSGTASSSPGSSTPSGATGSPGSSPSASTGT |
| 743)- | GPGSSPSASTGTGPGASPGTSSTGSPGASPGTSSTGSPGSSTPSGATGSPGSSPSASTGTGPGASP |
| AG576- | GTSSTGSPGSSPSASTGTGPGTPGSGTASSSPGSSTPSGATGSIEPRSPSGSPGATRRYYLGAVEL |
| (FVIII_168 | SWDYMQSDLGELPVDARFPPRVPKSFPFNTSVVYKKTLFVEFTVHLFNIAKPRPPWMGLLGP |
| 6-2332)-L- | TIQAEVYDTVVITLKNMASHPVSLHAVGVSYWKASEGAEYDDQTSQREKEDDKVFPGGSHT |
| CS-AG288 | YVWQVLKENGPMASDPLCLTYSYLSHVDLVKDLNSGLIGALLVCREGSLAKEKTQTLHKFIL |
| | LFAVFDEGKSWHSETKNSLMQDRDAASARAWPKMHTVNGYVNRSLPGLIGCHRKSVYWHV |
| | IGMGTTPEVHSIFLEGHTFLVRNHRQASLEISPITFLTAQTLLMDLGQFLLFCHISSHQHDGME |
| | AYVKVDSCPEEPQLRMKNNEEAEDYDDDLTDSEMDVVRFDDDNSPSFIQIRSVAKKHPKTW |
| | VHYIAAEEEDWDYAPLVLAPDDRSYKSQYLNNGPQRIGRKYKKVRFMAYTDETFKTREAIQ |
| | HESGILGPLLYGEVGDTLLIIFKNQASRPYNIYPHGITDVRPLYSRRLPKGVKHLKDFPILPGEIF |
| | KYKWTVTVEDGPTKSDPRCLTRYYSSFVNMERDLASGLIGPLLICYKESVDQRGNQIMSDKR |
| | NVILFSVFDENRSWYLTENIQRFLPNPAGVQLEDPEFQASNIMHSINGYVFDSLQLSVCLHEVA |
| | YWYILSIGAQTDFLSVFFSGYTFKHKMVYEDTLTLFPFSGETVFMSMENPGLWILGCHNSDFR |
| | NRGMTALLKVSSCDKNTGDYYEDSYEDISAYLLSKNNAIEPRSFSPGTPGSGTASSSPGSSTPS |
| | GATGSPGSSPSASTGTGPGSSPSASTGTGPGSSTPSGATGSPGSSTPSGATGSPGASPGTSSTGSP |
| | GASPGTSSTGSPGASPGTSSTGSPGTPGSGTASSSPGASPGTSSTGSPGASPGTSSTGSPGASPGT |
| | SSTGSPGSSPSASTGTGPGTPGSGTASSSPGASPGTSSTGSPGASPGTSSTGSPGASPGTSSTGSP |
| | GSSTPSGATGSPGSSTPSGATGSPGASPGTSSTGSPGTPGSGTASSSPGSSTPSGATGSPGSSTPS |
| | GATGSPGSSTPSGATGSPGSSPSASTGTGPGASPGTSSTGSPGASPGTSSTGSPGTPGSGTASSSP |
| | GASPGTSSTGSPGASPGTSSTGSPGASPGTSSTGSPGASPGTSSTGSPGTPGSGTASSSPGSSTPS |
| | GATGSPGTPGSGTASSSPGSSTPSGATGSPGTPGSGTASSSPGSSTPSGATGSPGSSTPSGATGSP |
| | GSSPSASTGTGPGSSPSASTGTGPGASPGTSSTGSPGTPGSGTASSSPGSSTPSGATGSPGSSPSA |
| | STGTGPGSSPSASTGTGPGASPGTSSTGSQSPRSFQKKTRHYFIAAVERLWDYGMSSSPHVLR |
| | NRAQSGSVPQFKKVVFQEFTDGSFTQPLYRGELNEHLGLLGPYIRAEVEDNIMVTFRNQASRP |
| | YSFYSSLISYEEDQRQGAEPRKNFVKPNETKTYFWKVQHHMAPTKDEFDCKAWAYFSDVDL |
| | EKDVHSGLIGPLLVCHTNTLNPAHGRQVTVQEFALFFTIFDETKSWYFTENMERNCRAPCNIQ |
| | MEDPTFKENYRFHAINGYIMDTLPGLVMAQDQRIRWYLLSMGSNENIHSIHFSGHVFTVRKK |
| | EEYKMALYNLYPGVFETVEMLPSKAGIWRVECLIGEHLHAGMSTLFLVYSNKCQTPLGMAS |
| | GHIRDFQITASGQYGQWAPKLARLHYSGSINAWSTKEPFSWIKVDLLAPMIIHGIKTQGARQK |
| | FSSLYISQFIIMYSLDGKKWQTYRGNSTGTLMVFFGNVDSSGIKHNIFNPPIIARYIRLHPTHYSI |
| | RSTLRMELMGCDLNSCSMPLGMESKAISDAQITASSYFTNMFATWSPSKARLHLQGRSNAW |
| | RPQVNNPKEWLQVDFQKTMKVTGVTTQGVKSLLTSMYVKEFLISSSQDGHQWTLFFQNGKV |
| | KVFQGNQDSFTPVVNSLDPPLLTRYLRIHPQSWVHQIALRMEVLGCEAQDLYGSPGQSPRSFQ |
| | PGASPGTSSTGSPGASPGTSSTGSPGTPGSGTASSSPGSSTPSGATGSPGTPGSGTASSSPGSSTP |
| | SGATGSPGTPGSGTASSSPGSSTPSGATGSPGSSTPSGATGSPGSSPSASTGTGPGSSPSASTGTG |
| | PGASPGTSSTGSPGTPGSGTASSSPGSSTPSGATGSPGSSPSASTGTGPGSSPSASTGTGPGASPG |
| | TSSTGSPGASPGTSSTGSPGSSTPSGATGSPGSSPSASTGTGPGASPGTSSTGSPGSSPSASTGTG |
| | PGTPGSGTASSSPGSSTPSGATGS |
| SP-AG576- | MQIELSTCFFLCLLRFCFSPGTPGSGTASSSPGSSTPSGATGSPGSSPSASTGTGPGSSPSASTGT |
| CS-L- | GPGSSTPSGATGSPGSSTPSGATGSPGASPGTSSTGSPGASPGTSSTGSPGASPGTSSTGSPGTPG |
| (FVIII_1- | SGTASSSPGASPGTSSTGSPGASPGTSSTGSPGASPGTSSTGSPGSSPSASTGTGPGTPGSGTASS |
| 745)- | SPGASPGTSSTGSPGASPGTSSTGSPGASPGTSSTGSPGSSTPSGATGSPGSSTPSGATGSPGASP |
| AG288- | GTSSTGSPGTPGSGTASSSPGSSTPSGATGSPGSSTPSGATGSPGSSTPSGATGSPGSSPSASTGT |
| (FVIII_168 | GPGASPGTSSTGSPGASPGTSSTGSPGTPGSGTASSSPGASPGTSSTGSPGASPGTSSTGSPGASP |
| 6-2332)-L- | GTSSTGSPGASPGTSSTGSPGTPGSGTASSSPGSSTPSGATGSPGTPGSGTASSSPGSSTPSGATG |
| CS-AE576 | SPGTPGSGTASSSPGSSTPSGATGSPGSSTPSGATGSPGSSPSASTGTGPGSSPSASTGTGPGASP |
| | GTSSTGSPGTPGSGTASSSPGSSTPSGATGSPGSSPSASTGTGPGSSPSASTGTGPGASPGTSSTG |
| | SQSPRSFQGSPGATRRYYLGAVELSWDYMQSDLGELPVDARFPPRVPKSFPFNTSVVYKKTLF |
| | VEFTVHLFNIAKPRPPWMGLLGPTIQAEVYDTVVITLKNMASHPVSLHAVGVSYWKASEGAE |
| | YDDQTSQREKEDDKVFPGGSHTYVWQVLKENGPMASDPLCLTYSYLSHVDLVKDLNSGLIG |
| | ALLVCREGSLAKEKTQTLHKFILLFAVFDEGKSWHSETKNSLMQDRDAASARAWPKMHTVN |
| | GYVNRSLPGLIGCHRKSVYWHVIGMGTTPEVHSIFLEGHTFLVRNHRQASLEISPITFLTAQTL |
| | LMDLGQFLLFCHISSHQHDGMEAYVKVDSCPEEPQLRMKNNEEAEDYDDDLTDSEMDVVRF |
| | DDDNSPSFIQIRSVAKKHPKTWVHYIAAEEEDWDYAPLVLAPDDRSYKSQYLNNGPQRIGRK |
| | YKKVRFMAYTDETFKTREAIQHESGILGPLLYGEVGDTLLIIFKNQASRPYNIYPHGITDVRPL |
| | YSRRLPKGVKHLKDFPILPGEIFKYKWTVTVEDGPTKSDPRCLTRYYSSFVNMERDLASGLIG |
| | PLLICYKESVDQRGNQIMSDKRNVILFSVFDENRSWYLTENIQRFLPNPAGVQLEDPEFQASNI |
| | MHSINGYVFDSLQLSVCLHEVAYWYILSIGAQTDFLSVFFSGYTFKHKMVYEDTLTLFPFSGE |
| | TVFMSMENPGLWILGCHNSDFRNRGMTALLKVSSCDKNTGDYYEDSYEDISAYLLSKNNAIE |
| | PRSFSQNPGASPGTSSTGSPGASPGTSSTGSPGTPGSGTASSSPGSSTPSGATGSPGTPGSGTASS |
| | SPGSSTPSGATGSPGTPGSGTASSSPGSSTPSGATGSPGSSTPSGATGSPGSSPSASTGTGPGSSP |
| | SASTGTGPGASPGTSSTGSPGTPGSGTASSSPGSSTPSGATGSPGSSPSASTGTGPGSSPSASTGT |
| | GPGASPGTSSTGSPGASPGTSSTGSPGSSTPSGATGSPGSSPSASTGTGPGASPGTSSTGSPGSSP |
| | SASTGTGPGTPGSGTASSSPGSSTPSGATGSQSPRSFQKKTRHYFIAAVERLWDYGMSSSPHVL |
| | RNRAQSGSVPQFKKVVFQEFTDGSFTQPLYRGELNEHLGLLGPYIRAEVEDNIMVTFRNQASR |
| | PYSFYSSLISYEEDQRQGAEPRKNFVKPNETKTYFWKVQHHMAPTKDEFDCKAWAYFSDVD |
| | LEKDVHSGLIGPLLVCHTNTLNPAHGRQVTVQEFALFFTIFDETKSWYFTENMERNCRAPCNI |
| | QMEDPTFKENYRFHAINGYIMDTLPGLVMAQDQRIRWYLLSMGSNENIHSIHFSGHVFTVRK |
| | KEEYKMALYNLYPGVFETVEMLPSKAGIWRVECLIGEHLHAGMSTLFLVYSNKCQTPLGMA |
| | SGHIRDFQITASGQYGQWAPKLARLHYSGSINAWSTKEPFSWIKVDLLAPMIIHGIKTQGARQ |
| | KFSSLYISQFIIMYSLDGKKWQTYRGNSTGTLMVFFGNVDSSGIKHNIFNPPIIARYIRLHPTHY |
| | SIRSTLRMELMGCDLNSCSMPLGMESKAISDAQITASSYFTNMFATWSPSKARLHLQGRSNA |
| | WRPQVNNPKEWLQVDFQKTMKVTGVTTQGVKSLLTSMYVKEFLISSSQDGHQWTLFFQNG |
| | KVKVFQGNQDSFTPVVNSLDPPLLTRYLRIHPQSWVHQIALRMEVLGCEAQDLYGSPGQSPR |
| | SFQGSPAGSPTSTEEGTSESATPESGPGTSTEPSEGSAPGSPAGSPTSTEEGTSTEPSEGSAPGTS |
| | TEPSEGSAPGTSESATPESGPGSEPATSGSETPGSEPATSGSETPGSPAGSPTSTEEGTSESATPES |
| | GPGTSTEPSEGSAPGTSTEPSEGSAPGSPAGSPTSTEEGTSTEPSEGSAPGTSTEPSEGSAPGTSE |
| | SATPESGPGTSTEPSEGSAPGTSESATPESGPGSEPATSGSETPGTSTEPSEGSAPGTSTEPSEGS |
| | APGTSESATPESGPGTSESATPESGPGSPAGSPTSTEEGTSESATPESGPGSEPATSGSETPGTSE |
| | SATPESGPGTSTEPSEGSAPGTSTEPSEGSAPGTSTEPSEGSAPGTSTEPSEGSAPGTSTEPSEGS |
| | APGTSTEPSEGSAPGSPAGSPTSTEEGTSTEPSEGSAPGTSESATPESGPGSEPATSGSETPGTSE |
| | SATPESGPGSEPATSGSETPGTSESATPESGPGTSTEPSEGSAPGTSESATPESGPGSPAGSPTST |
| | EEGSPAGSPTSTEEGSPAGSPTSTEEGTSESATPESGPGTSTEPSEGSAP |
| SP- | MQIELSTCFFLCLLRFCFSATRRYYLGAVELSWDYMQSDLGELPVDARFPPRVPKSFPFNTSV |
| (FVIII_1- | VYKKTLFVEFTVHLFNIAKPRPPWMGLLGPTIQAEVYDTVVITLKNMASHPVSLHAVGVSYW |
| 743)- | KASEGAEYDDQTSQREKEDDKVFPGGSHTYVWQVLKENGPMASDPLCLTYSYLSHVDLVK |
| AG576- | DLNSGLIGALLVCREGSLAKEKTQTLHKFILLFAVFDEGKSWHSETKNSLMQDRDAASARAW |
| (FVIII_168 | PKMHTVNGYVNRSLPGLIGCHRKSVYWHVIGMGTTPEVHSIFLEGHTFLVRNHRQASLEISPI |
| 6-2332)-L- | TFLTAQTLLMDLGQFLLFCHISSHQHDGMEAYVKVDSCPEEPQLRMKNNEEAEDYDDDLTD |
| CS-AG576 | SEMDVVRFDDDNSPSFIQIRSVAKKHPKTWVHYIAAEEEDWDYAPLVLAPDDRSYKSQYLNN |
| | GPQRIGRKYKKVRFMAYTDETFKTREAIQHESGILGPLLYGEVGDTLLIIFKNQASRPYNIYPH |
| | GITDVRPLYSRRLPKGVKHLKDFPILPGEIFKYKWTVTVEDGPTKSDPRCLTRYYSSFVNMER |
| | DLASGLIGPLLICYKESVDQRGNQIMSDKRNVILFSVFDENRSWYLTENIQRFLPNPAGVQLED |
| | PEFQASNIMHSINGYVFDSLQLSVCLHEVAYWYILSIGAQTDFLSVFFSGYTFKHKMVYEDTL |
| | TLFPFSGETVFMSMENPGLWILGCHNSDFRNRGMTALLKVSSCDKNTGDYYEDSYEDISAYL |
| | LSKNNAIEPRSFSPGTPGSGTASSSPGSSTPSGATGSPGSSPSASTGTGPGSSPSASTGTGPGSST |
| | PSGATGSPGSSTPSGATGSPGASPGTSSTGSPGASPGTSSTGSPGASPGTSSTGSPGTPGSGTASS |
| | SPGASPGTSSTGSPGASPGTSSTGSPGASPGTSSTGSPGSSPSASTGTGPGTPGSGTASSSPGASP |
| | GTSSTGSPGASPGTSSTGSPGASPGTSSTGSPGSSTPSGATGSPGSSTPSGATGSPGASPGTSSTG |
| | SPGTPGSGTASSSPGSSTPSGATGSPGSSTPSGATGSPGSSTPSGATGSPGSSPSASTGTGPGASP |
| | GTSSTGSPGASPGTSSTGSPGTPGSGTASSSPGASPGTSSTGSPGASPGTSSTGSPGASPGTSSTG |
| | SPGASPGTSSTGSPGTPGSGTASSSPGSSTPSGATGSPGTPGSGTASSSPGSSTPSGATGSPGTPG |
| | SGTASSSPGSSTPSGATGSPGSSTPSGATGSPGSSPSASTGTGPGSSPSASTGTGPGASPGTSSTG |
| | SPGTPGSGTASSSPGSSTPSGATGSPGSSPSASTGTGPGSSPSASTGTGPGASPGTSSTGSQSPRS |
| | FQKKTRHYFIAAVERLWDYGMSSSPHVLRNRAQSGSVPQFKKVVFQEFTDGSFTQPLYRGEL |
| | NEHLGLLGPYIRAEVEDNIMVTFRNQASRPYSFYSSLISYEEDQRQGAEPRKNFVKPNETKTY |
| | FWKVQHHMAPTKDEFDCKAWAYFSDVDLEKDVHSGLIGPLLVCHTNTLNPAHGRQVTVQE |
| | FALFFTIFDETKSWYFTENMERNCRAPCNIQMEDPTFKENYRFHAINGYIMDTLPGLVMAQD |
| | QRIRWYLLSMGSNENIHSIHFSGHVFTVRKKEEYKMALYNLYPGVFETVEMLPSKAGIWRVE |
| | CLIGEHLHAGMSTLFLVYSNKCQTPLGMASGHIRDFQITASGQYGQWAPKLARLHYSGSINA |
| | WSTKEPFSWIKVDLLAPMIIHGIKTQGARQKFSSLYISQFIIMYSLDGKKWQTYRGNSTGTLM |
| | VFFGNVDSSGIKHNIFNPPIIARYIRLHPTHYSIRSTLRMELMGCDLNSCSMPLGMESKAISDAQ |
| | ITASSYFTNMFATWSPSKARLHLQGRSNAWRPQVNNPKEWLQVDFQKTMKVTGVTTQGVK |
| | SLLTSMYVKEFLISSSQDGHQWTLFFQNGKVKVFQGNQDSFTPVVNSLDPPLLTRYLRIHPQS |
| | WVHQIALRMEVLGCEAQDLYGSPGQSPRSFQPGTPGSGTASSSPGSSTPSGATGSPGSSPSAST |
| | GTGPGSSPSASTGTGPGSSTPSGATGSPGSSTPSGATGSPGASPGTSSTGSPGASPGTSSTGSPG |
| | ASPGTSSTGSPGTPGSGTASSSPGASPGTSSTGSPGASPGTSSTGSPGASPGTSSTGSPGSSPSAS |
| | TGTGPGTPGSGTASSSPGASPGTSSTGSPGASPGTSSTGSPGASPGTSSTGSPGSSTPSGATGSPG |
| | SSTPSGATGSPGASPGTSSTGSPGTPGSGTASSSPGSSTPSGATGSPGSSTPSGATGSPGSSTPSG |
| | ATGSPGSSPSASTGTGPGASPGTSSTGSPGASPGTSSTGSPGTPGSGTASSSPGASPGTSSTGSPG |
| | ASPGTSSTGSPGASPGTSSTGSPGASPGTSSTGSPGTPGSGTASSSPGSSTPSGATGSPGTPGSGT |
| | ASSSPGSSTPSGATGSPGTPGSGTASSSPGSSTPSGATGSPGSSTPSGATGSPGSSPSASTGTGPG |
| | SSPSASTGTGPGASPGTSSTGSPGTPGSGTASSSPGSSTPSGATGSPGSSPSASTGTGPGSSPSAS |
| | TGTGPGASPGTSSTGS |
| SP-AG288- | MQIELSTCFFLCLLRFCFSPGASPGTSSTGSPGASPGTSSTGSPGTPGSGTASSSPGSSTPSGATG |
| CS-L- | SPGTPGSGTASSSPGSSTPSGATGSPGTPGSGTASSSPGSSTPSGATGSPGSSTPSGATGSPGSSP |
| (FVIII_1- | SASTGTGPGSSPSASTGTGPGASPGTSSTGSPGTPGSGTASSSPGSSTPSGATGSPGSSPSASTGT |
| 743)- | GPGSSPSASTGTGPGASPGTSSTGSPGASPGTSSTGSPGSSTPSGATGSPGSSPSASTGTGPGASP |
| AG288- | GTSSTGSPGSSPSASTGTGPGTPGSGTASSSPGSSTPSGATGSQSPRSFQGPSGPATRRYYLGAV |
| (FVIII_168 | ELSWDYMQSDLGELPVDARFPPRVPKSFPFNTSVVYKKTLFVEFTVHLFNIAKPRPPWMGLL |
| 6-2332)-L- | GPTIQAEVYDTVVITLKNMASHPVSLHAVGVSYWKASEGAEYDDQTSQREKEDDKVFPGGS |
| CS-AE288 | HTYVWQVLKENGPMASDPLCLTYSYLSHVDLVKDLNSGLIGALLVCREGSLAKEKTQTLHK |
| | FILLFAVFDEGKSWHSETKNSLMQDRDAASARAWPKMHTVNGYVNRSLPGLIGCHRKSVYW |
| | HVIGMGTTPEVHSIFLEGHTFLVRNHRQASLEISPITFLTAQTLLMDLGQFLLFCHISSHQHDG |
| | MEAYVKVDSCPEEPQLRMKNNEEAEDYDDDLTDSEMDVVRFDDDNSPSFIQIRSVAKKHPK |
| | TWVHYIAAEEEDWDYAPLVLAPDDRSYKSQYLNNGPQRIGRKYKKVRFMAYTDETFKTREA |
| | IQHESGILGPLLYGEVGDTLLIIFKNQASRPYNIYPHGITDVRPLYSRRLPKGVKHLKDFPILPGE |
| | IFKYKWTVTVEDGPTKSDPRCLTRYYSSFVNMERDLASGLIGPLLICYKESVDQRGNQIMSDK |
| | RNVILFSVFDENRSWYLTENIQRFLPNPAGVQLEDPEFQASNIMHSINGYVFDSLQLSVCLHEV |
| | AYWYILSIGAQTDFLSVFFSGYTFKHKMVYEDTLTLFPFSGETVFMSMENPGLWILGCHNSDF |
| | RNRGMTALLKVSSCDKNTGDYYEDSYEDISAYLLSKNNAIEPRSFSPGASPGTSSTGSPGASPG |
| | TSSTGSPGTPGSGTASSSPGSSTPSGATGSPGTPGSGTASSSPGSSTPSGATGSPGTPGSGTASSS |
| | PGSSTPSGATGSPGSSTPSGATGSPGSSPSASTGTGPGSSPSASTGTGPGASPGTSSTGSPGTPGS |
| | GTASSSPGSSTPSGATGSPGSSPSASTGTGPGSSPSASTGTGPGASPGTSSTGSPGASPGTSSTGS |
| | PGSSTPSGATGSPGSSPSASTGTGPGASPGTSSTGSPGSSPSASTGTGPGTPGSGTASSSPGSSTP |
| | SGATGSQSPRSFQKKTRHYFIAAVERLWDYGMSSSPHVLRNRAQSGSVPQFKKVVFQEFTDG |
| | SFTQPLYRGELNEHLGLLGPYIRAEVEDNIMVTFRNQASRPYSFYSSLISYEEDQRQGAEPRKN |
| | FVKPNETKTYFWKVQHHMAPTKDEFDCKAWAYFSDVDLEKDVHSGLIGPLLVCHTNTLNPA |
| | HGRQVTVQEFALFFTIFDETKSWYFTENMERNCRAPCNIQMEDPTFKENYRFHAINGYIMDTL |
| | PGLVMAQDQRIRWYLLSMGSNENIHSIHFSGHVFTVRKKEEYKMALYNLYPGVFETVEMLPS |
| | KAGIWRVECLIGEHLHAGMSTLFLVYSNKCQTPLGMASGHIRDFQITASGQYGQWAPKLARL |
| | HYSGSINAWSTKEPFSWIKVDLLAPMIIHGIKTQGARQKFSSLYISQFIIMYSLDGKKWQTYRG |
| | NSTGTLMVFFGNVDSSGIKHNIFNPPIIARYIRLHPTHYSIRSTLRMELMGCDLNSCSMPLGME |
| | SKAISDAQITASSYFTNMFATWSPSKARLHLQGRSNAWRPQVNNPKEWLQVDFQKTMKVTG |
| | VTTQGVKSLLTSMYVKEFLISSSQDGHQWTLFFQNGKVKVFQGNQDSFTPVVNSLDPPLLTR |
| | YLRIHPQSWVHQIALRMEVLGCEAQDLYGPSGPQSPRSFQGTSESATPESGPGSEPATSGSETP |
| | GTSESATPESGPGSEPATSGSETPGTSESATPESGPGTSTEPSEGSAPGSPAGSPTSTEEGTSESA |
| | TPESGPGSEPATSGSETPGTSESATPESGPGSPAGSPTSTEEGSPAGSPTSTEEGTSTEPSEGSAP |
| | GTSESATPESGPGTSESATPESGPGTSESATPESGPGSEPATSGSETPGSEPATSGSETPGSPAGS |
| | PTSTEEGTSTEPSEGSAPGTSTEPSEGSAPGSEPATSGSETPGTSESATPESGPGTSTEPSEGSAP |
| SP-AE576- | MQIELSTCFFLCLLRFCFSGSPAGSPTSTEEGTSESATPESGPGTSTEPSEGSAPGSPAGSPTSTEE |
| CS-L- | GTSTEPSEGSAPGTSTEPSEGSAPGTSESATPESGPGSEPATSGSETPGSEPATSGSETPGSPAGS |
| (FVIII_1- | PTSTEEGTSESATPESGPGTSTEPSEGSAPGTSTEPSEGSAPGSPAGSPTSTEEGTSTEPSEGSAP |
| 743)- | GTSTEPSEGSAPGTSESATPESGPGTSTEPSEGSAPGTSESATPESGPGSEPATSGSETPGTSTEPS |
| AG576- | EGSAPGTSTEPSEGSAPGTSESATPESGPGTSESATPESGPGSPAGSPTSTEEGTSESATPESGPG |
| (FVIII_1686- | SEPATSGSETPGTSESATPESGPGTSTEPSEGSAPGTSTEPSEGSAPGTSTEPSEGSAPGTSTEPSE |
| 2332) | GSAPGTSTEPSEGSAPGTSTEPSEGSAPGSPAGSPTSTEEGTSTEPSEGSAPGTSESATPESGPGS |
| | EPATSGSETPGTSESATPESGPGSEPATSGSETPGTSESATPESGPGTSTEPSEGSAPGTSESATP |
| | ESGPGSPAGSPTSTEEGSPAGSPTSTEEGSPAGSPTSTEEGTSESATPESGPGTSTEPSEGSAPQS |
| | PRSFQGSPGATRRYYLGAVELSWDYMQSDLGELPVDARFPPRVPKSFPFNTSVVYKKTLFVE |
| | FTVHLFNIAKPRPPWMGLLGPTIQAEVYDTVVITLKNMASHPVSLHAVGVSYWKASEGAEYD |
| | DQTSQREKEDDKVFPGGSHTYVWQVLKENGPMASDPLCLTYSYLSHVDLVKDLNSGLIGAL |
| | LVCREGSLAKEKTQTLHKFILLFAVFDEGKSWHSETKNSLMQDRDAASARAWPKMHTVNGY |
| | VNRSLPGLIGCHRKSVYWHVIGMGTTPEVHSIFLEGHTFLVRNHRQASLEISPITFLTAQTLLM |
| | DLGQFLLFCHISSHQHDGMEAYVKVDSCPEEPQLRMKNNEEAEDYDDDLTDSEMDVVRFDD |
| | DNSPSFIQIRSVAKKHPKTWVHYIAAEEEDWDYAPLVLAPDDRSYKSQYLNNGPQRIGRKYK |
| | KVRFMAYTDETFKTREAIQHESGILGPLLYGEVGDTLLIIFKNQASRPYNIYPHGITDVRPLYSR |
| | RLPKGVKHLKDFPILPGEIFKYKWTVTVEDGPTKSDPRCLTRYYSSFVNMERDLASGLIGPLLI |
| | CYKESVDQRGNQIMSDKRNVILFSVFDENRSWYLTENIQRFLPNPAGVQLEDPEFQASNIMHS |
| | INGYVFDSLQLSVCLHEVAYWYILSIGAQTDFLSVFFSGYTFKHKMVYEDTLTLFPFSGETVF |
| | MSMENPGLWILGCHNSDFRNRGMTALLKVSSCDKNTGDYYEDSYEDISAYLLSKNNAIEPRS |
| | FSPGTPGSGTASSSPGSSTPSGATGSPGSSPSASTGTGPGSSPSASTGTGPGSSTPSGATGSPGSS |
| | TPSGATGSPGASPGTSSTGSPGASPGTSSTGSPGASPGTSSTGSPGTPGSGTASSSPGASPGTSST |
| | GSPGASPGTSSTGSPGASPGTSSTGSPGSSPSASTGTGPGTPGSGTASSSPGASPGTSSTGSPGAS |
| | PGTSSTGSPGASPGTSSTGSPGSSTPSGATGSPGSSTPSGATGSPGASPGTSSTGSPGTPGSGTAS |
| | SSPGSSTPSGATGSPGSSTPSGATGSPGSSTPSGATGSPGSSPSASTGTGPGASPGTSSTGSPGAS |
| | PGTSSTGSPGTPGSGTASSSPGASPGTSSTGSPGASPGTSSTGSPGASPGTSSTGSPGASPGTSST |
| | GSPGTPGSGTASSSPGSSTPSGATGSPGTPGSGTASSSPGSSTPSGATGSPGTPGSGTASSSPGSS |
| | TPSGATGSPGSSTPSGATGSPGSSPSASTGTGPGSSPSASTGTGPGASPGTSSTGSPGTPGSGTAS |
| | SSPGSSTPSGATGSPGSSPSASTGTGPGSSPSASTGTGPGASPGTSSTGSQSPRSFQKKTRHYFIA |
| | AVERLWDYGMSSSPHVLRNRAQSGSVPQFKKVVFQEFTDGSFTQPLYRGELNEHLGLLGPYI |
| | RAEVEDNIMVTFRNQASRPYSFYSSLISYEEDQRQGAEPRKNFVKPNETKTYFWKVQHHMAP |
| | TKDEFDCKAWAYFSDVDLEKDVHSGLIGPLLVCHTNTLNPAHGRQVTVQEFALFFTIFDETKS |
| | WYFTENMERNCRAPCNIQMEDPTFKENYRFHAINGYIMDTLPGLVMAQDQRIRWYLLSMGS |
| | NENIHSIHFSGHVFTVRKKEEYKMALYNLYPGVFETVEMLPSKAGIWRVECLIGEHLHAGMS |
| | TLFLVYSNKCQTPLGMASGHIRDFQITASGQYGQWAPKLARLHYSGSINAWSTKEPFSWIKV |
| | DLLAPMIIHGIKTQGARQKFSSLYISQFIIMYSLDGKKWQTYRGNSTGTLMVFFGNVDSSGIKH |
| | NIFNPPIIARYIRLHPTHYSIRSTLRMELMGCDLNSCSMPLGMESKAISDAQITASSYFTNMFAT |
| | WSPSKARLHLQGRSNAWRPQVNNPKEWLQVDFQKTMKVTGVTTQGVKSLLTSMYVKEFLI |
| | SSSQDGHQWTLFFQNGKVKVFQGNQDSFTPVVNSLDPPLLTRYLRIHPQSWVHQIALRMEVL |
| | GCEAQDLY |
| FVIII | ATRRYYLGAVELSWDYMQSDLGELPVDARFPPRVPKSFPFNTSVVYKKTLFVEFTVHLFNIA |
| BDD2 | KPRPPWMGLLGPTIQAEVYDTVVITLKNMASHPVSLHAVGVSYWKASEGAEYDDQTSQREK |
| S367- | EDDKVFPGGSHTYVWQVLKENGPMASDPLCLTYSYLSHVDLVKDLNSGLIGALLVCREGSL |
| FXIa- | AKEKTQTLHKFILLFAVFDEGKSWHSETKNSLMQDRDAASARAWPKMHTVNGYVNSSLPGL |
| AE42- | IGCHRKSVYWHVIGMGTTPEVHSIFLEGHTFLVRNHRQASLEISPITFLTAQTLLMDLGQFLLF |
| F368- | CHISSHQHDGMEAYVKVDSCPEEPQLRMKNNEEAEDYDDDLTDSEMDVVRFDDDNSPSKET |
| Y2332- | RAETGEPSEGSAPGSPAGSPTSTEEGTSESATPESGPGSEPATSGSGFIQIRSVAKKHPKTWVHY |
| FXIa- | IAAEEEDWDYAPLVLAPDDRSYKSQYLNNGPQRIGRKYKKVRFMAYTDETFKTREAIQHESG |
| AE864 | ILGPLLYGEVGDTLLIIFKNQASRPYNIYPHGITDVRPLYSRRLPKGVKHLKDFPILPGEIFKYK |
| | WTVTVEDGPTKSDPRCLTRYYSSFVNMERDLASGLIGPLLICYKESVDQRGNQIMSDKRNVIL |
| | FSVFDENRSWYLTENIQRFLPNPAGVQLEDPEFQASNIMHSINGYVFDSLQLSVCLHEVAYWY |
| | ILSIGAQTDFLSVFFSGYTFKHKMVYEDTLTLFPFSGETVFMSMENPGLWILGCHNSDFRNRG |
| | MTALLKVSSCDKNTGDYYEDSYEDISAYLLSKNNAIEPRSFSQNPPVEKRHQREITRTTLQSD |
| | QEEIDYDDTISVEMKKEDFDIYDEDENQSPRSFQKKTRHYFIAAVERLWDYGMSSSPHVLRNR |
| | AQSGSVPQFKKVVFQEFTDGSFTQPLYRGELNEHLGLLGPYIRAEVEDNIMVTFRNQASRPYS |
| | FYSSLISYEEDQRQGAEPRKNFVKPNETKTYFWKVQHHMAPTKDEFDCKAWAYFSDVDLEK |
| | DVHSGLIGPLLVCHTNTLNPAHGRQVTVQEFALFFTIFDETKSWYFTENMERNCRAPCNIQME |
| | DPTFKENYRFHAINGYIMDTLPGLVMAQDQRIRWYLLSMGSNENIHSIHFSGHVFTVRKKEEY |
| | KMALYNLYPGVFETVEMLPSKAGIWRVECLIGEHLHAGMSTLFLVYSNKCQTPLGMASGHIR |
| | DFQITASGQYGQWAPKLARLHYSGSINAWSTKEPFSWIKVDLLAPMIIHGIKTQGARQKFSSL |
| | YISQFIIMYSLDGKKWQTYRGNSTGTLMVFFGNVDSSGIKHNIFNPPIIARYIRLHPTHYSIRSTL |
| | RMELMGCDENSCSMPLGMESKAISDAQITASSYFTNMFATWTPSKARLHLQGRSNAWRPQV |
| | NNPKEWLQVDFQKTMKVTGVTTQGVKSLLTSMYVKEFLISSSQDGHQWTLFFQNGKVKVFQ |
| | GNQDSFTPVVNSLDPPLLTRYLRIHPQSWVHQIALRMEVLGCEAQDLYKLTRAETGGSPAGSP |
| | TSTEEGTSESATPESGPGTSTEPSEGSAPGSPAGSPTSTEEGTSTEPSEGSAPGTSTEPSEGSAPG |
| | TSESATPESGPGSEPATSGSETPGSEPATSGSETPGSPAGSPTSTEEGTSESATPESGPGTSTEPSE |
| | GSAPGTSTEPSEGSAPGSPAGSPTSTEEGTSTEPSEGSAPGTSTEPSEGSAPGTSESATPESGPGT |
| | STEPSEGSAPGTSESATPESGPGSEPATSGSETPGTSTEPSEGSAPGTSTEPSEGSAPGTSESATPE |
| | SGPGTSESATPESGPGSPAGSPTSTEEGTSESATPESGPGSEPATSGSETPGTSESATPESGPGTS |
| | TEPSEGSAPGTSTEPSEGSAPGTSTEPSEGSAPGTSTEPSEGSAPGTSTEPSEGSAPGTSTEPSEGS |
| | APGSPAGSPTSTEEGTSTEPSEGSAPGTSESATPESGPGSEPATSGSETPGTSESATPESGPGSEP |
| | ATSGSETPGTSESATPESGPGTSTEPSEGSAPGTSESATPESGPGSPAGSPTSTEEGSPAGSPTST |
| | EEGSPAGSPTSTEEGTSESATPESGPGTSTEPSEGSAPGTSESATPESGPGSEPATSGSETPGTSE |
| | SATPESGPGSEPATSGSETPGTSESATPESGPGTSTEPSEGSAPGSPAGSPTSTEEGTSESATPES |
| | GPGSEPATSGSETPGTSESATPESGPGSPAGSPTSTEEGSPAGSPTSTEEGTSTEPSEGSAPGTSE |
| | SATPESGPGTSESATPESGPGTSESATPESGPGSEPATSGSETPGSEPATSGSETPGSPAGSPTST |
| | EEGTSTEPSEGSAPGTSTEPSEGSAPGSEPATSGSETPGTSESATPESGPGTSTEPSEGSAP |
| FVIII | ATRRYYLGAVELSWDYMQSDLGELPVDARFPPRVPKSFPFNTSVVYKKTLFVEFTVHLFNIA |
| BDD2 | KPRPPWMGLLGPTIQAEVYDTVVITLKNMASHPVSLHAVGVSYWKASEGAEYDDQTSQREK |
| N745- | EDDKVFPGGSHTYVWQVLKENGPMASDPLCLTYSYLSHVDLVKDLNSGLIGALLVCREGSL |
| FIXa- | AKEKTQTLHKFILLFAVFDEGKSWHSETKNSLMQDRDAASARAWPKMHTVNGYVNRSLPGL |
| AG288- | IGCHRKSVYWHVIGMGTTPEVHSIFLEGHTFLVRNHRQASLEISPITFLTAQTLLMDLGQFLLF |
| FIXa- | CHISSHQHDGMEAYVKVDSCPEEPQLRMKNNEEAEDYDDDLTDSEMDVVRFDDDNSPSFIQI |
| P1640- | RSVAKKHPKTWVHYIAAEEEDWDYAPLVLAPDDRSYKSQYLNNGPQRIGRKYKKVRFMAY |
| Y2332- | TDETFKTREAIQHESGILGPLLYGEVGDTLLIIFKNQASRPYNIYPHGITDVRPLYSRRLPKGVK |
| FIXa- | HLKDFPILPGEIFKYKWTVTVEDGPTKSDPRCLTRYYSSFVNMERDLASGLIGPLLICYKESVD |
| AG864 | QRGNQIMSDKRNVILFSVFDENRSWYLTENIQRFLPNPAGVQLEDPEFQASNIMHSINGYVFD |
| | SLQLSVCLHEVAYWYILSIGAQTDFLSVFFSGYTFKHKMVYEDTLTLFPFSGETVFMSMENPG |
| | LWILGCHNSDFRNRGMTALLKVSSCDKNTGDYYEDSYEDISAYLLSKNNAIEPRSFSQNPLGR |
| | IVGGPGASPGTSSTGSPGASPGTSSTGSPGTPGSGTASSSPGSSTPSGATGSPGTPGSGTASSSPG |
| | SSTPSGATGSPGTPGSGTASSSPGSSTPSGATGSPGSSTPSGATGSPGSSPSASTGTGPGSSPSAS |
| | TGTGPGASPGTSSTGSPGTPGSGTASSSPGSSTPSGATGSPGSSPSASTGTGPGSSPSASTGTGPG |
| | ASPGTSSTGSPGASPGTSSTGSPGSSTPSGATGSPGSSPSASTGTGPGASPGTSSTGSPGSSPSAS |
| | TGTGPGTPGSGTASSSPGSSTPSGATGSGPLGRIVGGPPVLKRHQREITRTTLQSDQEEIDYDDT |
| | ISVEMKKEDFDIYDEDENQSPRSFQKKTRHYFIAAVERLWDYGMSSSPHVLRNRAQSGSVPQ |
| | FKKVVFQEFTDGSFTQPLYRGELNEHLGLLGPYIRAEVEDNIMVTFRNQASRPYSFYSSLISYE |
| | EDQRQGAEPRKNFVKPNETKTYFWKVQHHMAPTKDEFDCKAWAYFSDVDLEKDVHSGLIG |
| | PLLVCHTNTLNPAHGRQVTVQEFALFFTIFDETKSWYFTENMERNCRAPCNIQMEDPTFKEN |
| | YRFHAINGYIMDTLPGLVMAQDQRIRWYLLSMGSNENIHSIHFSGHVFTVRKKEEYKMALYN |
| | LYPGVFETVEMLPSKAGIWRVECLIGEHLHAGMSTLFLVYSNKCQTPLGMASGHIRDFQITAS |
| | GQYGQWAPKLARLHYSGSINAWSTKEPFSWIKVDLLAPMIIHGIKTQGARQKFSSLYISQFIIM |
| | YSLDGKKWQTYRGNSTGTLMVFFGNVDSSGIKHNIFNPPIIARYIRLHPTHYSIRSTLRMELMG |
| | CDLNSCSMPLGMESKAISDAQITASSYFTNMFATWSPSKARLHLQGRSNAWRPQVNNPKEW |
| | LQVDFQKTMKVTGVTTQGVKSLLTSMYVKEFLISSSQDGHQWTLFFQNGKVKVFQGNQDSF |
| | TPVVNSLDPPLLTRYLRIHPQSWVHQIALRMEVLGCEAQDLYPLGRIVGGGASPGTSSTGSPG |
| | SSPSASTGTGPGSSPSASTGTGPGTPGSGTASSSPGSSTPSGATGSPGSSPSASTGTGPGASPGTS |
| | STGSPGTPGSGTASSSPGSSTPSGATGSPGTPGSGTASSSPGASPGTSSTGSPGASPGTSSTGSPG |
| | TPGSGTASSSPGSSTPSGATGSPGASPGTSSTGSPGTPGSGTASSSPGSSTPSGATGSPGSSPSAS |
| | TGTGPGSSPSASTGTGPGSSTPSGATGSPGSSTPSGATGSPGASPGTSSTGSPGASPGTSSTGSPG |
| | ASPGTSSTGSPGTPGSGTASSSPGASPGTSSTGSPGASPGTSSTGSPGASPGTSSTGSPGSSPSAS |
| | TGTGPGTPGSGTASSSPGASPGTSSTGSPGASPGTSSTGSPGASPGTSSTGSPGSSTPSGATGSPG |
| | SSTPSGATGSPGASPGTSSTGSPGTPGSGTASSSPGSSTPSGATGSPGSSTPSGATGSPGSSTPSG |
| | ATGSPGSSPSASTGTGPGASPGTSSTGSPGASPGTSSTGSPGTPGSGTASSSPGASPGTSSTGSPG |
| | ASPGTSSTGSPGASPGTSSTGSPGASPGTSSTGSPGTPGSGTASSSPGSSTPSGATGSPGTPGSGT |
| | ASSSPGSSTPSGATGSPGTPGSGTASSSPGSSTPSGATGSPGSSTPSGATGSPGSSPSASTGTGPG |
| | SSPSASTGTGPGASPGTSSTGSPGTPGSGTASSSPGSSTPSGATGSPGSSPSASTGTGPGSSPSAS |
| | TGTGPGASPGTSSTGSPGASPGTSSTGSPGSSTPSGATGSPGSSPSASTGTGPGASPGTSSTGSPG |
| | SSPSASTGTGPGTPGSGTASSSPGSSTPSGATGSPGSSTPSGATGSPGASPGTSSTGSP |
| FVIII | ATRRYYLGAVELSWDYMQSDLGELPVDARFPPRVPKSFPFNTSVVYKKTLFVEFTVHLFNIA |
| BDD2 | KPRPPWMGLLGPTIQAEVYDTVVITLKNMASHPVSLHAVGVSYWKASEGAEYDDQTSQREK |
| V128- | EDDKVLQVRIVGGGAPSPSASTGTGPGTPGSGTASSSPGSSTPSGATGSPGPSGPGLQVRIVGG |
| FVIIa- | FPGGSHTYVWQVLKENGPMASDPLCLTYSYLSHVDLVKDLNSGLIGALLVCREGSLAKEKTQ |
| AG42- | TLHKFILLFAVFDEGKSWHSETKNSLMQDRDAASARAWPKMHTVNGYVNRSLPGLIGCHRK |
| FVIIa- | SVYWHVIGMGTTPEVHSIFLEGHTFLVRNHRQASLEISPITFLTAQTLLMDLGQFLLFCHISSH |
| G2044- | QHDGMEAYVKVDSCPEEPQLRMKNNEEAEDYDDDLTDSEMDVVRFDDDNSPSFIQIRSVAK |
| FVIIa- | KHPKTWVHYIAAEEEDWDYAPLVLAPDDRSYKSQYLNNGPQRIGRKYKKVRFMAYTDETF |
| AG144- | KTREAIQHESGILGPLLYGEVGDTLLIIFKNQASRPYNIYPHGITDVRPLYSRRLPKGVKHLKDF |
| Y2332- | PILPGEIFKYKWTVTVEDGPTKSDPRCLTRYYSSFVNMERDLASGLIGPLLICYKESVDQRGNQ |
| FVIIa- | IMSDKRNVILFSVFDENRSWYLTENIQRFLPNPAGVQLEDPEFQASNIMHSINGYVFDSLQLSV |
| AG576 | CLHEVAYWYILSIGAQTDFLSVFFSGYTFKHKMVYEDTLTLFPFSGETVFMSMENPGLWILGC |
| | HNSDFRNRGMTALLKVSSCDKNTGDYYEDSYEDISAYLLSKNNAIEPRSFSQNPPVLKRHQRE |
| | ITRTTLQSDQEEIDYDDTISVEMKKEDFDIYDEDENQSPRSFQKKTRHYFIAAVERLWDYGMS |
| | SSPHVLRNRAQSGSVPQFKKVVFQEFTDGSFTQPLYRGELNEHLGLLGPYIRAEVEDNIMVTF |
| | RNQASRPYSFYSSLISYEEDQRQGAEPRKNFVKPNETKTYFWKVQHHMAPTKDEFDCKAWA |
| | YFSDVDLEKDVHSGLIGPLLVCHTNTLNPAHGRQVTVQEFALFFTIFDETKSWYFTENMERNC |
| | RAPCNIQMEDPTFKENYRFHAINGYIMDTLPGLVMAQDQRIRWYLLSMGSNENIHSIHFSGHV |
| | FTVRKKEEYKMALYNLYPGVFETVEMLPSKAGIWRVECLIGEHLHAGMSTLFLVYSNKCQTP |
| | LGMASGHIRDFQITASGQYGLQVRIVGGSGTASSSPGSSTPSGATGSPGTPGSGTASSSPGSSTP |
| | SGATGSPGSSTPSGATGSPGSSPSASTGTGPGSSPSASTGTGPGASPGTSSTGSPGTPGSGTASSS |
| | PGSSTPSGATGSPGSSPSASTGTGPGSSPSASTGTGPGASPGLQVRIVGGQWAPKLARLHYSGS |
| | INAWSTKEPFSWIKVDLLAPMIIHGIKTQGARQKFSSLYISQFIIMYSLDGKKWQTYRGNSTGT |
| | LMVFFGNVDSSGIKHNIFNPPIIARYIRLHPTHYSIRSTLRMELMGCDLNSCSMPLGMESKAISD |
| | AQITASSYFTNMFATWSPSKARLHLQGRSNAWRPQVNNPKEWLQVDFQKTMKVTGVTTQG |
| | VKSLLTSMYVKEFLISSSQDGHQWTLFFQNGKVKVFQGNQDSFTPVVNSLDPPLLTRYLRIHP |
| | QSWVHQIALRMEVLGCEAQDLYLQVRIVGGPGTPGSGTASSSPGSSTPSGATGSPGSSPSAST |
| | GTGPGSSPSASTGTGPGSSTPSGATGSPGSSTPSGATGSPGASPGTSSTGSPGASPGTSSTGSPG |
| | ASPGTSSTGSPGTPGSGTASSSPGASPGTSSTGSPGASPGTSSTGSPGASPGTSSTGSPGSSPSAS |
| | TGTGPGTPGSGTASSSPGASPGTSSTGSPGASPGTSSTGSPGASPGTSSTGSPGSSTPSGATGSPG |
| | SSTPSGATGSPGASPGTSSTGSPGTPGSGTASSSPGSSTPSGATGSPGSSTPSGATGSPGSSTPSG |
| | ATGSPGSSPSASTGTGPGASPGTSSTGSPGASPGTSSTGSPGTPGSGTASSSPGASPGTSSTGSPG |
| | ASPGTSSTGSPGASPGTSSTGSPGASPGTSSTGSPGTPGSGTASSSPGSSTPSGATGSPGTPGSGT |
| | ASSSPGSSTPSGATGSPGTPGSGTASSSPGSSTPSGATGSPGSSTPSGATGSPGSSPSASTGTGPG |
| | SSPSASTGTGPGASPGTSSTGSPGTPGSGTASSSPGSSTPSGATGSPGSSPSASTGTGPGSSPSAS |
| | TGTGPGASPGTSSTGS |
| AE864- | GSPAGSPTSTEEGTSESATPESGPGTSTEPSEGSAPGSPAGSPTSTEEGTSTEPSEGSAPGTSTEPS |
| FVIII- | EGSAPGTSESATPESGPGSEPATSGSETPGSEPATSGSETPGSPAGSPTSTEEGTSESATPESGPG |
| Thrombin- | TSTEPSEGSAPGTSTEPSEGSAPGSPAGSPTSTEEGTSTEPSEGSAPGTSTEPSEGSAPGTSESATP |
| AE144 | ESGPGTSTEPSEGSAPGTSESATPESGPGSEPATSGSETPGTSTEPSEGSAPGTSTEPSEGSAPGT |
| | SESATPESGPGTSESATPESGPGSPAGSPTSTEEGTSESATPESGPGSEPATSGSETPGTSESATPE |
| | SGPGTSTEPSEGSAPGTSTEPSEGSAPGTSTEPSEGSAPGTSTEPSEGSAPGTSTEPSEGSAPGTS |
| | TEPSEGSAPGSPAGSPTSTEEGTSTEPSEGSAPGTSESATPESGPGSEPATSGSETPGTSESATPES |
| | GPGSEPATSGSETPGTSESATPESGPGTSTEPSEGSAPGTSESATPESGPGSPAGSPTSTEEGSPA |
| | GSPTSTEEGSPAGSPTSTEEGTSESATPESGPGTSTEPSEGSAPGTSESATPESGPGSEPATSGSE |
| | TPGTSESATPESGPGSEPATSGSETPGTSESATPESGPGTSTEPSEGSAPGSPAGSPTSTEEGTSES |
| | ATPESGPGSEPATSGSETPGTSESATPESGPGSPAGSPTSTEEGSPAGSPTSTEEGTSTEPSEGSA |
| | PGTSESATPESGPGTSESATPESGPGTSESATPESGPGSEPATSGSETPGSEPATSGSETPGSPAG |
| | SPTSTEEGTSTEPSEGSAPGTSTEPSEGSAPGSEPATSGSETPGTSESATPESGPGTSTEPSEGSAP |
| | GATRRYYLGAVELSWDYMQSDEGELPVDARFPPRVPKSFPFNTSVVYKKTEFVEFTDHLFNI |
| | AKPRPPWMGLEGPTIQAEVYDTVVITEKNMASHPVSLHAVGVSYWKASEGAEYDDQTSQRE |
| | KEDDKVFPGGSHTYVWQVLKENGPMASDPLCLTYSYLSHVDLVKDLNSGLIGALLVCREGS |
| | LAKEKTQTLHKFILLFAVFDEGKSWHSETKNSLMQDRDAASARAWPKMHTVNGYVNRSLPG |
| | LIGCHRKSVYWHVIGMGTTPEVHSIFLEGHTFLVRNHRQASLEISPITFLTAQTLLMDLGQFLL |
| | FCHISSHQHDGMEAYVKVDSCPEEPQLRMKNNEEAEDYDDDLTDSEMDVVRFDDDNSPSFIQ |
| | IRSVAKKHPKTWVHYIAAEEEDWDYAPLVLAPDDRSYKSQYLNNGPQRIGRKYKKVRFMAY |
| | TDETFKTREAIQHESGILGPLLYGEVGDTLLIIFKNQASRPYNIYPHGITDVRPLYSRRLPKGVK |
| | HLKDFPILPGEIFKYKWTVTVEDGPTKSDPRCLTRYYSSFVNMERDLASGLIGPLLICYKESVD |
| | QRGNQIMSDKRNVILFSVFDENRSWYETENIQRFLPNPAGVQLEDPEFQASNIMHSINGYVFD |
| | SLQLSVCLHEVAYWYILSIGAQTDFLSVFFSGYTFKHKMVYEDTLTLFPFSGETVFMSMENPG |
| | LWILGCHNSDFRNRGMTALLKVSSCDKNTGDYYEDSYEDISAYLLSKNNAIEPRSFSQNSRHP |
| | STRQKQFNATTIPENDIEKTDPWFAHRTPMPKIQNVSSSDLLMLLRQSPTPHGLSLSDLQEAKY |
| | ETFSDDPSPGAIDSNNSLSEMTHFRPQLHHSGDMVFTPESGLQLRLNEKLGTTAATELKKLDF |
| | KVSSTSNNLISTIPSDNLAAGTDNTSSLGPPSMPVHYDSQLDTTLFGKKSSPLTESGGPLSLSEE |
| | NNDSKLLESGLMNSQESSWGKNVSSTESGRLFKGKRAHGPALLTKDNALFKVSISLLKTNKT |
| | SNNSATNRKTHIDGPSLLIENSPSVWQNILESDTEFKKVTPLIHDRMLMDKNATALRLNHMSN |
| | KTTSSKNMEMVQQKKEGPIPPDAQNPDMSFFKMLFLPESARWIQRTHGKNSLNSGQGPSPKQ |
| | LVSLGPEKSVEGQNFLSEKNKVVVGKGEFTKDVGLKEMVFPSSRNLFLTNLDNLHENNTHNQ |
| | EKKIQEEIEKKETLIQENVVLPQIHTVTGTKNFMKNLFLLSTRQNVEGSYDGAYAPVLQDFRS |
| | LNDSTNRTKKHTAHFSKKGEEENLEGLGNQTKQIVEKYACTTRISPNTSQQNFVTQRSKRAL |
| | KQFRLPLEETELEKRIIVDDTSTQWSKNMKHLTPSTLTQIDYNEKEKGAITQSPLSDCLTRSHSI |
| | PQANRSPLPIAKVSSFPSIRPIYLTRVLFQDNSSHLPAASYRKKDSGVQESSHFLQGAKKNNLS |
| | LAILTLEMTGDQREVGSLGTSATNSVTYKKVENTVLPKPDLPKTSGKVELLPKVHIYQKDLFP |
| | TETSNGSPGHLDLVEGSLLQGTEGAIKWNEANRPGKVPFLRVATESSAKTPSKLLDPLAWDN |
| | HYGTQIPKEEWKSQEKSPEKTAFKKKDTILSLNACESNHAIAAINEGQNKPEIEVTWAKQGRT |
| | ERLCSQNPPVLKRHQREITRTTLQSDQEEIDYDDTISVEMKKEDFDIYDEDENQSPRSFQKKTR |
| | HYFIAAVERLWDYGMSSSPHVLRNRAQSGSVPQFKKVVFQEFTDGSFTQPLYRGELNEHLGL |
| | LGPYIRAEVEDNIMVTFRNQASRPYSFYSSLISYEEDQRQGAEPRKNFVKPNETKTYFWKVQH |
| | HMAPTKDEFDCKAWAYFSDVDLEKDVHSGLIGPLLVCHTNTLNPAHGRQVTVQEFALFFTIF |
| | DETKSWYFTENMERNCRAPCNIQMEDPTFKENYRFHAINGYIMDTLPGLVMAQDQRIRWYL |
| | LSMGSNENIHSIHFSGHVFTVRKKEEYKMALYNLYPGVFETVEMLPSKAGIWRVECLIGEHLH |
| | AGMSTLFLVYSNKCQTPLGMASGHIRDFQITASGQYGQWAPKLARLHYSGSINAWSTKEPFS |
| | WIKVDLLAPMIIHGIKTQGARQKFSSLYISQFIIMYSLDGKKWQTYRGNSTGTLMVFFGNVDS |
| | SGIKHNIFNPPIIARYIRLHPTHYSIRSTLRMELMGCDLNSCSMPLGMESKAISDAQITASSYFTN |
| | MFATWSPSKARLHLQGRSNAWRPQVNNPKEWLQVDFQKTMKVTGVTTQGVKSLLTSMYV |
| | KEFLISSSQDGHQWTLFFQNGKVKVFQGNQDSFTPVVNSLDPPLLTRYLRIHPQSWVHQIALR |
| | MEVLGCEAQDLYGLTPRSLLVGGSEPATSGSETPGTSESATPESGPGSEPATSGSETPGSPAGS |
| | PTSTEEGTSTEPSEGSAPGSEPATSGSETPGSEPATSGSETPGSEPATSGSETPGTSTEPSEGSAP |
| | GTSESATPESGPGSEPATSGSETPGTSTEPSEGSAP |
| FVIII | ATRRYYLGAVELSWDYMQSDLGELPVDARFPPRVPKSFPFNTSVVYKKTLFVEFTVHLFNIA |
| BDD3- | KPRPPWMGLLGPTIQAEVYDTVVITLKNMASHPVSLHAVGVSYWKASEGAEYDDQTSQREK |
| FXIIa- | EDDKVFPGGSHTYVWQVLKENGPMASDPLCLTYSYLSHVDLVKDLNSGLIGALLVCREGSL |
| AE144 | AKEKTQTLHKFILLFAVFDEGKSWHSETKNSLMQDRDAASARAWPKMHTVNGYVNRSLPGL |
| | IGCHRKSVYWHVIGMGTTPEVHSIFLEGHTFLVRNHRQASLEISPITFLTAQTLLMDLGQFLLF |
| | CHISSHQHDGMEAYVKVDSCPEEPQLRMKNNEEAEDYDDDLTDSEMDVVRFDDDNSPSFIQI |
| | RSVAKKHPKTWVHYIAAEEEDWDYAPLVLAPDDRSYKSQYLNNGPQRIGRKYKKVRFMAY |
| | TDETFKTREAIQHESGILGPLLYGEVGDTLLIIFKNQASRPYNIYPHGITDVRPLYSRRLPKGVK |
| | HLKDFPILPGEIFKYKWTVTVEDGPTKSDPRCLTRYYSSFVNMERDLASGLIGPLLICYKESVD |
| | QRGNQIMSDKRNVILFSVFDENRSWYLTENIQRFLPNPAGVQLEDPEFQASNIMHSINGYVFD |
| | SLQLSVCLHEVAYWYILSIGAQTDFLSVFFSGYTFKHKMVYEDTLTLFPFSGETVFMSMENPG |
| | LWILGCHNSDFRNRGMTALLKVSSCDKNTGDYYEDSYEDISAYLLSKNNAIEPRSFSQNPPVL |
| | KRHQGEITRTTLQSDQEEIDYDDTISVEMKKEDFDIYDEDENQSPRSFQKKTRHYFIAAVERL |
| | WDYGMSSSPHVLRNRAQSGSVPQFKKVVFQEFTDGSFTQPLYRGELNEHLGLLGPYIRAEVE |
| | DNIMVTFRNQASRPYSFYSSLISYEEDQRQGAEPRKNFVKPNETKTYFWKVQHHMAPTKDEF |
| | DCKAWAYFSDVDLEKDVHSGLIGPLLVCHTNTLNPAHGRQVTVQEFALFFTIFDETKSWYFT |
| | ENMERNCRAPCNIQMEDPTFKENYRFHAINGYIMDTLPGLVMAQDQRIRWYLLSMGSNENIH |
| | SIHFSGHVFTVRKKEEYKMALYNLYPGVFETVEMLPSKAGIWRVECLIGEHLHAGMSTLFLV |
| | YSNKCQTPLGMASGHIRDFQITASGQYGQWAPKLARLHYSGSINAWSTKEPFSWIKVDLLAP |
| | MIIHGIKTQGARQKFSSLYISQFIIMYSLDGKKWQTYRGNSTGTLMVFFGNVDSSGIKHNIFNP |
| | PIIARYIRLHPTHYSIRSTLRMELMGCDLNSCSMPLGMESKAISDAQITASSYFTNMFATWSPS |
| | KARLHLQGRSNAWRPQVNNPKEWLQVDFQKTMKVTGVTTQGVKSLLTSMYVKEFLISSSQD |
| | GHQWTLFFQNGKVKVFQGNQDSFTPVVNSLDPPLLTRYLRIHPQSWVHQIALRMEVLGCEA |
| | QDLYGTMTRIVGGGGSEPATSGSETPGTSESATPESGPGSEPATSGSETPGSPAGSPTSTEEGTS |
| | TEPSEGSAPGSEPATSGSETPGSEPATSGSETPGSEPATSGSETPGTSTEPSEGSAPGTSESATPES |
| | GPGSEPATSGSETPGTSTEPSEGSAP |
| FVIII | ATRRYYLGAVELSWDYMQSDLGELPVDARFPPRVPKSFPFNTSVVYKKTLFVEFTVHLFNIA |
| BDD3- | KPRPPWMGLLGPTIQAEVYDTVVITLKNMASHPVSLHAVGVSYWKASEGAEYDDQTSQREK |
| Elastase- | EDDKVFPGGSHTYVWQVLKENGPMASDPLCLTYSYLSHVDLVKDLNSGLIGALLVCREGSL |
| AE144 | AKEKTQTLHKFILLFAVFDEGKSWHSETKNSLMQDRDAASARAWPKMHTVNGYVNRSLPGL |
| | IGCHRKSVYWHVIGMGTTPEVHSIFLEGHTFLVRNHRQASLEISPITFLTAQTLLMDLGQFLLF |
| | CHISSHQHDGMEAYVKVDSCPEEPQLRMKNNEEAEDYDDDLTDSEMDVVRFDDDNSPSFIQI |
| | RSVAKKHPKTWVHYIAAEEEDWDYAPLVLAPDDRSYKSQYLNNGPQRIGRKYKKVRFMAY |
| | TDETFKTREAIQHESGILGPLLYGEVGDTLLIIFKNQASRPYNIYPHGITDVRPLYSRRLPKGVK |
| | HLKDFPILPGEIFKYKWTVTVEDGPTKSDPRCLTRYYSSFVNMERDLASGLIGPLLICYKESVD |
| | QRGNQIMSDKRNVILFSVFDENRSWYLTENIQRFLPNPAGVQLEDPEFQASNIMHSINGYVFD |
| | SLQLSVCLHEVAYWYILSIGAQTDFLSVFFSGYTFKHKMVYEDTLTLFPFSGETVFMSMENPG |
| | LWILGCHNSDFRNRGMTALLKVSSCDKNTGDYYEDSYEDISAYLLSKNNAIEPRSFSQNPPVL |
| | KRHQGEITRTTLQSDQEEIDYDDTISVEMKKEDFDIYDEDENQSPRSFQKKTRHYFIAAVERL |
| | WDYGMSSSPHVLRNRAQSGSVPQFKKVVFQEFTDGSFTQPLYRGELNEHLGLLGPYIRAEVE |
| | DNIMVTFRNQASRPYSFYSSLISYEEDQRQGAEPRKNFVKPNETKTYFWKVQHHMAPTKDEF |
| | DCKAWAYFSDVDLEKDVHSGLIGPLLVCHTNTLNPAHGRQVTVQEFALFFTIFDETKSWYFT |
| | ENMERNCRAPCNIQMEDPTFKENYRFHAINGYIMDTLPGLVMAQDQRIRWYLLSMGSNENIH |
| | SIHFSGHVFTVRKKEEYKMALYNLYPGVFETVEMLPSKAGIWRVECLIGEHLHAGMSTLFLV |
| | YSNKCQTPLGMASGHIRDFQITASGQYGQWAPKLARLHYSGSINAWSTKEPFSWIKVDLLAP |
| | MIIHGIKTQGARQKFSSLYISQFIIMYSLDGKKWQTYRGNSTGTLMVFFGNVDSSGIKHNIFNP |
| | PIIARYIRLHPTHYSIRSTLRMELMGCDLNSCSMPLGMESKAISDAQITASSYFTNMFATWSPS |
| | KARLHLQGRSNAWRPQVNNPKEWLQVDFQKTMKVTGVTTQGVKSLLTSMYVKEFLISSSQD |
| | GHQWTLFFQNGKVKVFQGNQDSFTPVVNSLDPPLLTRYLRIHPQSWVHQIALRMEVLGCEA |
| | QDLYGGGSEPATSGSETPGTSESATPESGPGSEPATSGSETPGSPAGSPTSTEEGTSTEPSEGSAP |
| | GSEPATSGSETPGSEPATSGSETPGSEPATSGSETPGTSTEPSEGSAPGTSESATPESGPGSEPAT |
| | SGSETPGTSTEPSEGSAP |
| FVIII | ATRRYYLGAVELSWDYMQSDLGELPVDARFPPRVPKSFPFNTSVVYKKTLFVEFTVHLFNIA |
| BDD3- | KPRPPWMGLLGPTIQAEVYDTVVITLKNMASHPVSLHAVGVSYWKASEGAEYDDQTSQREK |
| FXIa- | EDDKVFPGGSHTYVWQVLKENGPMASDPLCLTYSYLSHVDLVKDLNSGLIGALLVCREGSL |
| AE144 | AKEKTQTLHKFILLFAVFDEGKSWHSETKNSLMQDRDAASARAWPKMHTVNGYVNRSLPGL |
| | IGCHRKSVYWHVIGMGTTPEVHSIFLEGHTFLVRNHRQASLEISPITFLTAQTLLMDLGQFLLF |
| | CHISSHQHDGMEAYVKVDSCPEEPQLRMKNNEEAEDYDDDLTDSEMDVVRFDDDNSPSFIQI |
| | RSVAKKHPKTWVHYIAAEEEDWDYAPLVLAPDDRSYKSQYLNNGPQRIGRKYKKVRFMAY |
| | TDETFKTREAIQHESGILGPLLYGEVGDTLLIIFKNQASRPYNIYPHGITDVRPLYSRRLPKGVK |
| | HLKDFPILPGEIFKYKWTVTVEDGPTKSDPRCLTRYYSSFVNMERDLASGLIGPLLICYKESVD |
| | QRGNQIMSDKRNVILFSVFDENRSWYLTENIQRFLPNPAGVQLEDPEFQASNIMHSINGYVFD |
| | SLQLSVCLHEVAYWYILSIGAQTDFLSVFFSGYTFKHKMVYEDTLTLFPFSGETVFMSMENPG |
| | LWILGCHNSDFRNRGMTALLKVSSCDKNTGDYYEDSYEDISAYLLSKNNAIEPRSFSQNPPVL |
| | KRHQGEITRTTLQSDQEEIDYDDTISVEMKKEDFDIYDEDENQSPRSFQKKTRHYFIAAVERL |
| | WDYGMSSSPHVLRNRAQSGSVPQFKKVVFQEFTDGSFTQPLYRGELNEHLGLLGPYIRAEVE |
| | DNIMVTFRNQASRPYSFYSSLISYEEDQRQGAEPRKNFVKPNETKTYFWKVQHHMAPTKDEF |
| | DCKAWAYFSDVDLEKDVHSGLIGPLLVCHTNTLNPAHGRQVTVQEFALFFTIFDETKSWYFT |
| | ENMERNCRAPCNIQMEDPTFKENYRFHAINGYIMDTLPGLVMAQDQRIRWYLLSMGSNENIH |
| | SIHFSGHVFTVRKKEEYKMALYNLYPGVFETVEMLPSKAGIWRVECLIGEHLHAGMSTLFLV |
| | YSNKCQTPLGMASGHIRDFQITASGQYGQWAPKLARLHYSGSINAWSTKEPFSWIKVDLLAP |
| | MIIHGIKTQGARQKFSSLYISQFIIMYSLDGKKWQTYRGNSTGTLMVFFGNVDSSGIKHNIFNP |
| | PIIARYIRLHPTHYSIRSTLRMELMGCDLNSCSMPLGMESKAISDAQITASSYFTNMFATWSPS |
| | KARLHLQGRSNAWRPQVNNPKEWLQVDFQKTMKVTGVTTQGVKSLLTSMYVKEFLISSSQD |
| | GHQWTLFFQNGKVKVFQGNQDSFTPVVNSLDPPLLTRYLRIHPQSWVHQIALRMEVLGCEA |
| | QDLYGKLTRAETGGSEPATSGSETPGTSESATPESGPGSEPATSGSETPGSPAGSPTSTEEGTST |
| | EPSEGSAPGSEPATSGSETPGSEPATSGSETPGSEPATSGSETPGTSTEPSEGSAPGTSESATPES |
| | GPGSEPATSGSETPGTSTEPSEGSAP |
| FVIII | ATRRYYLGAVELSWDYMQSDLGELPVDARFPPRVPKSFPFNTSVVYKKTLFVEFTVHLFNIA |
| BDD3- | KPRPPWMGLLGPTIQAEVYDTVVITLKNMASHPVSLHAVGVSYWKASEGAEYDDQTSQREK |
| Thrombin- | EDDKVFPGGSHTYVWQVLKENGPMASDPLCLTYSYLSHVDLVKDLNSGLIGALLVCREGSL |
| AE144 | AKEKTQTLHKFILLFAVFDEGKSWHSETKNSLMQDRDAASARAWPKMHTVNGYVNRSLPGL |
| | IGCHRKSVYWHVIGMGTTPEVHSIFLEGHTFLVRNHRQASLEISPITFLTAQTLLMDLGQFLLF |
| | CHISSHQHDGMEAYVKVDSCPEEPQLRMKNNEEAEDYDDDLTDSEMDVVRFDDDNSPSFIQI |
| | RSVAKKHPKTWVHYIAAEEEDWDYAPLVLAPDDRSYKSQYLNNGPQRIGRKYKKVRFMAY |
| | TDETFKTREAIQHESGILGPLLYGEVGDTLLIIFKNQASRPYNIYPHGITDVRPLYSRRLPKGVK |
| | HLKDFPILPGEIFKYKWTVTVEDGPTKSDPRCLTRYYSSFVNMERDLASGLIGPLLICYKESVD |
| | QRGNQIMSDKRNVILFSVFDENRSWYLTENIQRFLPNPAGVQLEDPEFQASNIMHSINGYVFD |
| | SLQLSVCLHEVAYWYILSIGAQTDFLSVFFSGYTFKHKMVYEDTLTLFPFSGETVFMSMENPG |
| | LWILGCHNSDFRNRGMTALLKVSSCDKNTGDYYEDSYEDISAYLLSKNNAIEPRSFSQNPPVL |
| | KRHQGEITRTTLQSDQEEIDYDDTISVEMKKEDFDIYDEDENQSPRSFQKKTRHYFIAAVERL |
| | WDYGMSSSPHVLRNRAQSGSVPQFKKVVFQEFTDGSFTQPLYRGELNEHLGLLGPYIRAEVE |
| | DNIMVTFRNQASRPYSFYSSLISYEEDQRQGAEPRKNFVKPNETKTYFWKVQHHMAPTKDEF |
| | DCKAWAYFSDVDLEKDVHSGLIGPLLVCHTNTLNPAHGRQVTVQEFALFFTIFDETKSWYFT |
| | ENMERNCRAPCNIQMEDPTFKENYRFHAINGYIMDTLPGLVMAQDQRIRWYLLSMGSNENIH |
| | SIHFSGHVFTVRKKEEYKMALYNLYPGVFETVEMLPSKAGIWRVECLIGEHLHAGMSTLFLV |
| | YSNKCQTPLGMASGHIRDFQITASGQYGQWAPKLARLHYSGSINAWSTKEPFSWIKVDLLAP |
| | MIIHGIKTQGARQKFSSLYISQFIIMYSLDGKKWQTYRGNSTGTLMVFFGNVDSSGIKHNIFNP |
| | PIIARYIRLHPTHYSIRSTLRMELMGCDLNSCSMPLGMESKAISDAQITASSYFTNMFATWSPS |
| | KARLHLQGRSNAWRPQVNNPKEWLQVDFQKTMKVTGVTTQGVKSLLTSMYVKEFLISSSQD |
| | GHQWTLFFQNGKVKVFQGNQDSFTPVVNSLDPPLLTRYLRIHPQSWVHQIALRMEVLGCEA |
| | QDLYGLTPRSLLVGGSEPATSGSETPGTSESATPESGPGSEPATSGSETPGSPAGSPTSTEEGTS |
| | TEPSEGSAPGSEPATSGSETPGSEPATSGSETPGSEPATSGSETPGTSTEPSEGSAPGTSESATPES |
| | GPGSEPATSGSETPGTSTEPSEGSAP |
| AE144- | GSEPATSGSETPGTSESATPESGPGSEPATSGSETPGSPAGSPTSTEEGTSTEPSEGSAPGSEPAT |
| FVIII | SGSETPGSEPATSGSETPGSEPATSGSETPGTSTEPSEGSAPGTSESATPESGPGSEPATSGSETP |
| BDD2- | GTSTEPSEGSAPGATRRYYLGAVELSWDYMQSDLGELPVDARFPPRVPKSFPFNTSVVYKKT |
| MMP-17- | LFVEFTVHLFNIAKPRPPWMGLLGPTIQAEVYDTVVITLKNMASHPVSLHAVGVSYWKASEG |
| AE864 | AEYDDQTSQREKEDDKVFPGGSHTYVWQVLKENGPMASDPLCLTYSYLSHVDLVKDLNSGL |
| | IGALLVCREGSLAKEKTQTLHKFILLFAVFDEGKSWHSETKNSLMQDRDAASARAWPKMHT |
| | VNGYVNRSLPGLIGCHRKSVYWHVIGMGTTPEVHSIFLEGHTFLVRNHRQASLEISPITFLTAQ |
| | TLLMDLGQFLLFCHISSHQHDGMEAYVKVDSCPEEPQLRMKNNEEAEDYDDDLTDSEMDVV |
| | RFDDDNSPSFIQIRSVAKKHPKTWVHYIAAEEEDWDYAPLVLAPDDRSYKSQYLNNGPQRIG |
| | RKYKKVRFMAYTDETFKTREAIQHESGILGPLLYGEVGDTLLIIFKNQASRPYNIYPHGITDVR |
| | PLYSRRLPKGVKHLKDFPILPGEIFKYKWTVTVEDGPTKSDPRCLTRYYSSFVNMERDLASGL |
| | IGPLLICYKESVDQRGNQIMSDKRNVILFSVFDENRSWYLTENIQRFLPNPAGVQLEDPEFQAS |
| | NIMHSINGYVFDSLQLSVCLHEVAYWYILSIGAQTDFLSVFFSGYTFKHKMVYEDTLTLFPFS |
| | GETVFMSMENPGLWILGCHNSDFRNRGMTALLKVSSCDKNTGDYYEDSYEDISAYLLSKNN |
| | AIEPRSFSQNPPVLKRHQREITRTTLQSDQEEIDYDDTISVEMKKEDFDIYDEDENQSPRSFQKK |
| | TRHYFIAAVERLWDYGMSSSPHVLRNRAQSGSVPQFKKVVFQEFTDGSFTQPLYRGELNEHL |
| | GLLGPYIRAEVEDNIMVTFRNQASRPYSFYSSLISYEEDQRQGAEPRKNFVKPNETKTYFWKV |
| | QHHMAPTKDEFDCKAWAYFSDVDLEKDVHSGLIGPLLVCHTNTLNPAHGRQVTVQEFALFF |
| | TIFDETKSWYFTENMERNCRAPCNIQMEDPTFKENYRFHAINGYIMDTLPGLVMAQDQRIRW |
| | YLLSMGSNENIHSIHFSGHVFTVRKKEEYKMALYNLYPGVFETVEMLPSKAGIWRVECLIGEH |
| | LHAGMSTLFLVYSNKCQTPLGMASGHIRDFQITASGQYGQWAPKLARLHYSGSINAWSTKEP |
| | FSWIKVDLLAPMIIHGIKTQGARQKFSSLYISQFIIMYSLDGKKWQTYRGNSTGTLMVFFGNV |
| | DSSGIKHNIFNPPIIARYIRLHPTHYSIRSTLRMELMGCDLNSCSMPLGMESKAISDAQITASSYF |
| | TNMFATWSPSKARLHLQGRSNAWRPQVNNPKEWLQVDFQKTMKVTGVTTQGVKSLLTSM |
| | YVKEFLISSSQDGHQWTLFFQNGKVKVFQGNQDSFTPVVNSLDPPLLTRYLRIHPQSWVHQIA |
| | LRMEVLGCEAQDLYGAPLGLRLRGGSPAGSPTSTEEGTSESATPESGPGTSTEPSEGSAPGSPA |
| | GSPTSTEEGTSTEPSEGSAPGTSTEPSEGSAPGTSESATPESGPGSEPATSGSETPGSEPATSGSE |
| | TPGSPAGSPTSTEEGTSESATPESGPGTSTEPSEGSAPGTSTEPSEGSAPGSPAGSPTSTEEGTST |
| | EPSEGSAPGTSTEPSEGSAPGTSESATPESGPGTSTEPSEGSAPGTSESATPESGPGSEPATSGSE |
| | TPGTSTEPSEGSAPGTSTEPSEGSAPGTSESATPESGPGTSESATPESGPGSPAGSPTSTEEGTSES |
| | ATPESGPGSEPATSGSETPGTSESATPESGPGTSTEPSEGSAPGTSTEPSEGSAPGTSTEPSEGSA |
| | PGTSTEPSEGSAPGTSTEPSEGSAPGTSTEPSEGSAPGSPAGSPTSTEEGTSTEPSEGSAPGTSES |
| | ATPESGPGSEPATSGSETPGTSESATPESGPGSEPATSGSETPGTSESATPESGPGTSTEPSEGSA |
| | PGTSESATPESGPGSPAGSPTSTEEGSPAGSPTSTEEGSPAGSPTSTEEGTSESATPESGPGTSTEP |
| | SEGSAPGTSESATPESGPGSEPATSGSETPGTSESATPESGPGSEPATSGSETPGTSESATPESGP |
| | GTSTEPSEGSAPGSPAGSPTSTEEGTSESATPESGPGSEPATSGSETPGTSESATPESGPGSPAGS |
| | PTSTEEGSPAGSPTSTEEGTSTEPSEGSAPGTSESATPESGPGTSESATPESGPGTSESATPESGP |
| | GSEPATSGSETPGSEPATSGSETPGSPAGSPTSTEEGTSTEPSEGSAPGTSTEPSEGSAPGSEPAT |
| | SGSETPGTSESATPESGPGTSTEPSEGSAP |
| AE144- | GSEPATSGSETPGTSESATPESGPGSEPATSGSETPGSPAGSPTSTEEGTSTEPSEGSAPGSEPAT |
| FVIII | SGSETPGSEPATSGSETPGSEPATSGSETPGTSTEPSEGSAPGTSESATPESGPGSEPATSGSETP |
| BDD2- | GTSTEPSEGSAPGATRRYYLGAVELSWDYMQSDLGELPVDARFPPRVPKSFPFNTSVVYKKT |
| FXIIa- | LFVEFTVHLFNIAKPRPPWMGLLGPTIQAEVYDTVVITLKNMASHPVSLHAVGVSYWKASEG |
| AE864 | AEYDDQTSQREKEDDKVFPGGSHTYVWQVLKENGPMASDPLCLTYSYLSHVDLVKDLNSGL |
| | IGALLVCREGSLAKEKTQTLHKFILLFAVFDEGKSWHSETKNSLMQDRDAASARAWPKMHT |
| | VNGYVNRSLPGLIGCHRKSVYWHVIGMGTTPEVHSIFLEGHTFLVRNHRQASLEISPITFLTAQ |
| | TLLMDLGQFLLFCHISSHQHDGMEAYVKVDSCPEEPQLRMKNNEEAEDYDDDLTDSEMDVV |
| | RFDDDNSPSFIQIRSVAKKHPKTWVHYIAAEEEDWDYAPLVLAPDDRSYKSQYLNNGPQRIG |
| | RKYKKVRFMAYTDETFKTREAIQHESGILGPLLYGEVGDTLLIIFKNQASRPYNIYPHGITDVR |
| | PLYSRRLPKGVKHLKDFPILPGEIFKYKWTVTVEDGPTKSDPRCLTRYYSSFVNMERDLASGL |
| | IGPLLICYKESVDQRGNQIMSDKRNVILFSVFDENRSWYLTENIQRFLPNPAGVQLEDPEFQAS |
| | NIMHSINGYVFDSLQLSVCLHEVAYWYILSIGAQTDFLSVFFSGYTFKHKMVYEDTLTLFPFS |
| | GETVFMSMENPGLWILGCHNSDFRNRGMTALLKVSSCDKNTGDYYEDSYEDISAYLLSKNN |
| | AIEPRSFSQNPPVLKRHQREITRTTLQSDQEEIDYDDTISVEMKKEDFDIYDEDENQSPRSFQKK |
| | TRHYFIAAVERLWDYGMSSSPHVLRNRAQSGSVPQFKKVVFQEFTDGSFTQPLYRGELNEHL |
| | GLLGPYIRAEVEDNIMVTFRNQASRPYSFYSSLISYEEDQRQGAEPRKNFVKPNETKTYFWKV |
| | QHHMAPTKDEFDCKAWAYFSDVDLEKDVHSGLIGPLLVCHTNTLNPAHGRQVTVQEFALFF |
| | TIFDETKSWYFTENMERNCRAPCNIQMEDPTFKENYRFHAINGYIMDTLPGLVMAQDQRIRW |
| | YLLSMGSNENIHSIHFSGHVFTVRKKEEYKMALYNLYPGVFETVEMLPSKAGIWRVECLIGEH |
| | LHAGMSTLFLVYSNKCQTPLGMASGHIRDFQITASGQYGQWAPKLARLHYSGSINAWSTKEP |
| | FSWIKVDLLAPMIIHGIKTQGARQKFSSLYISQFIIMYSLDGKKWQTYRGNSTGTLMVFFGNV |
| | DSSGIKHNIFNPPIIARYIRLHPTHYSIRSTLRMELMGCDLNSCSMPLGMESKAISDAQITASSYF |
| | TNMFATWSPSKARLHLQGRSNAWRPQVNNPKEWLQVDFQKTMKVTGVTTQGVKSLLTSM |
| | YVKEFLISSSQDGHQWTLFFQNGKVKVFQGNQDSFTPVVNSLDPPLLTRYLRIHPQSWVHQIA |
| | LRMEVLGCEAQDLYGTMTRIVGGGGSPAGSPTSTEEGTSESATPESGPGTSTEPSEGSAPGSPA |
| | GSPTSTEEGTSTEPSEGSAPGTSTEPSEGSAPGTSESATPESGPGSEPATSGSETPGSEPATSGSE |
| | TPGSPAGSPTSTEEGTSESATPESGPGTSTEPSEGSAPGTSTEPSEGSAPGSPAGSPTSTEEGTST |
| | EPSEGSAPGTSTEPSEGSAPGTSESATPESGPGTSTEPSEGSAPGTSESATPESGPGSEPATSGSE |
| | TPGTSTEPSEGSAPGTSTEPSEGSAPGTSESATPESGPGTSESATPESGPGSPAGSPTSTEEGTSES |
| | ATPESGPGSEPATSGSETPGTSESATPESGPGTSTEPSEGSAPGTSTEPSEGSAPGTSTEPSEGSA |
| | PGTSTEPSEGSAPGTSTEPSEGSAPGTSTEPSEGSAPGSPAGSPTSTEEGTSTEPSEGSAPGTSES |
| | ATPESGPGSEPATSGSETPGTSESATPESGPGSEPATSGSETPGTSESATPESGPGTSTEPSEGSA |
| | PGTSESATPESGPGSPAGSPTSTEEGSPAGSPTSTEEGSPAGSPTSTEEGTSESATPESGPGTSTEP |
| | SEGSAPGTSESATPESGPGSEPATSGSETPGTSESATPESGPGSEPATSGSETPGTSESATPESGP |
| | GTSTEPSEGSAPGSPAGSPTSTEEGTSESATPESGPGSEPATSGSETPGTSESATPESGPGSPAGS |
| | PTSTEEGSPAGSPTSTEEGTSTEPSEGSAPGTSESATPESGPGTSESATPESGPGTSESATPESGP |
| | GSEPATSGSETPGSEPATSGSETPGSPAGSPTSTEEGTSTEPSEGSAPGTSTEPSEGSAPGSEPAT |
| | SGSETPGTSESATPESGPGTSTEPSEGSAP |
| AG144- | SGTASSSPGSSTPSGATGSPGTPGSGTASSSPGSSTPSGATGSPGSSTPSGATGSPGSSPSASTGT |
| FVIII | GPGSSPSASTGTGPGASPGTSSTGSPGTPGSGTASSSPGSSTPSGATGSPGSSPSASTGTGPGSSP |
| BDD2- | SASTGTGPGASPGATRRYYLGAVELSWDYMQSDLGELPVDARFPPRVPKSFPFNTSVVYKKT |
| FXIa- | LFVEFTVHLFNIAKPRPPWMGLLGPTIQAEVYDTVVITLKNMASHPVSLHAVGVSYWKASEG |
| AG576 | AEYDDQTSQREKEDDKVFPGGSHTYVWQVLKENGPMASDPLCLTYSYLSHVDLVKDLNSGL |
| | IGALLVCREGSLAKEKTQTLHKFILLFAVFDEGKSWHSETKNSLMQDRDAASARAWPKMHT |
| | VNGYVNRSLPGLIGCHRKSVYWHVIGMGTTPEVHSIFLEGHTFLVRNHRQASLEISPITFLTAQ |
| | TLLMDLGQFLLFCHISSHQHDGMEAYVKVDSCPEEPQLRMKNNEEAEDYDDDLTDSEMDVV |
| | RFDDDNSPSFIQIRSVAKKHPKTWVHYIAAEEEDWDYAPLVLAPDDRSYKSQYLNNGPQRIG |
| | RKYKKVRFMAYTDETFKTREAIQHESGILGPLLYGEVGDTLLIIFKNQASRPYNIYPHGITDVR |
| | PLYSRRLPKGVKHLKDFPILPGEIFKYKWTVTVEDGPTKSDPRCLTRYYSSFVNMERDLASGL |
| | IGPLLICYKESVDQRGNQIMSDKRNVILFSVFDENRSWYLTENIQRFLPNPAGVQLEDPEFQAS |
| | NIMHSINGYVFDSLQLSVCLHEVAYWYILSIGAQTDFLSVFFSGYTFKHKMVYEDTLTLFPFS |
| | GETVFMSMENPGLWILGCHNSDFRNRGMTALLKVSSCDKNTGDYYEDSYEDISAYLLSKNN |
| | AIEPRSFSQNPPVLKRHQREITRTTLQSDQEEIDYDDTISVEMKKEDFDIYDEDENQSPRSFQKK |
| | TRHYFIAAVERLWDYGMSSSPHVLRNRAQSGSVPQFKKVVFQEFTDGSFTQPLYRGELNEHL |
| | GLLGPYIRAEVEDNIMVTFRNQASRPYSFYSSLISYEEDQRQGAEPRKNFVKPNETKTYFWKV |
| | QHHMAPTKDEFDCKAWAYFSDVDLEKDVHSGLIGPLLVCHTNTLNPAHGRQVTVQEFALFF |
| | TIFDETKSWYFTENMERNCRAPCNIQMEDPTFKENYRFHAINGYIMDTLPGLVMAQDQRIRW |
| | YLLSMGSNENIHSIHFSGHVFTVRKKEEYKMALYNLYPGVFETVEMLPSKAGIWRVECLIGEH |
| | LHAGMSTLFLVYSNKCQTPLGMASGHIRDFQITASGQYGQWAPKLARLHYSGSINAWSTKEP |
| | FSWIKVDLLAPMIIHGIKTQGARQKFSSLYISQFIIMYSLDGKKWQTYRGNSTGTLMVFFGNV |
| | DSSGIKHNIFNPPIIARYIRLHPTHYSIRSTLRMELMGCDLNSCSMPLGMESKAISDAQITASSYF |
| | TNMFATWSPSKARLHLQGRSNAWRPQVNNPKEWLQVDFQKTMKVTGVTTQGVKSLLTSM |
| | YVKEFLISSSQDGHQWTLFFQNGKVKVFQGNQDSFTPVVNSLDPPLLTRYLRIHPQSWVHQIA |
| | LRMEVLGCEAQDLYGKLTRAETGPGTPGSGTASSSPGSSTPSGATGSPGSSPSASTGTGPGSSP |
| | SASTGTGPGSSTPSGATGSPGSSTPSGATGSPGASPGTSSTGSPGASPGTSSTGSPGASPGTSSTG |
| | SPGTPGSGTASSSPGASPGTSSTGSPGASPGTSSTGSPGASPGTSSTGSPGSSPSASTGTGPGTPG |
| | SGTASSSPGASPGTSSTGSPGASPGTSSTGSPGASPGTSSTGSPGSSTPSGATGSPGSSTPSGATG |
| | SPGASPGTSSTGSPGTPGSGTASSSPGSSTPSGATGSPGSSTPSGATGSPGSSTPSGATGSPGSSP |
| | SASTGTGPGASPGTSSTGSPGASPGTSSTGSPGTPGSGTASSSPGASPGTSSTGSPGASPGTSSTG |
| | SPGASPGTSSTGSPGASPGTSSTGSPGTPGSGTASSSPGSSTPSGATGSPGTPGSGTASSSPGSST |
| | PSGATGSPGTPGSGTASSSPGSSTPSGATGSPGSSTPSGATGSPGSSPSASTGTGPGSSPSASTGT |
| | GPGASPGTSSTGSPGTPGSGTASSSPGSSTPSGATGSPGSSPSASTGTGPGSSPSASTGTGPGASP |
| | GTSSTGS |
| AE144- | GSEPATSGSETPGTSESATPESGPGSEPATSGSETPGSPAGSPTSTEEGTSTEPSEGSAPGSEPAT |
| FXIa-FVIII | SGSETPGSEPATSGSETPGSEPATSGSETPGTSTEPSEGSAPGTSESATPESGPGSEPATSGSETP |
| BDD2- | GTSTEPSEGSAPGKLTRAETGATRRYYLGAVELSWDYMQSDLGELPVDARFPPRVPKSFPFNT |
| AE864 | SVVYKKTLFVEFTDHLFNIAKPRPPWMGLLGPTIQAEVYDTVVITLKNMASHPVSLHAVGVS |
| | YWKASEGAEYDDQTSQREKEDDKVFPGGSHTYVWQVLKENGPMASDPLCLTYSYLSHVDL |
| | VKDLNSGLIGALLVCREGSLAKEKTQTLHKFILLFAVFDEGKSWHSETKNSLMQDRDAASAR |
| | AWPKMHTVNGYVNRSLPGLIGCHRKSVYWHVIGMGTTPEVHSIFLEGHTFLVRNHRQASLEI |
| | SPITFLTAQTLLMDLGQFLLFCHISSHQHDGMEAYVKVDSCPEEPQLRMKNNEEAEDYDDDL |
| | TDSEMDVVRFDDDNSPSFIQIRSVAKKHPKTWVHYIAAEEEDWDYAPLVLAPDDRSYKSQYL |
| | NNGPQRIGRKYKKVRFMAYTDETFKTREAIQHESGILGPLLYGEVGDTLLIIFKNQASRPYNIY |
| | PHGITDVRPLYSRRLPKGVKHLKDFPILPGEIFKYKWTVTVEDGPTKSDPRCLTRYYSSFVNM |
| | ERDLASGLIGPLLICYKESVDQRGNQIMSDKRNVILFSVFDENRSWYLTENIQRFLPNPAGVQL |
| | EDPEFQASNIMHSINGYVFDSLQLSVCLHEVAYWYILSIGAQTDFLSVFFSGYTFKHKMVYED |
| | TLTLFPFSGETVFMSMENPGLWILGCHNSDFRNRGMTALLKVSSCDKNTGDYYEDSYEDISA |
| | YLLSKNNAIEPRSFSQNPPVLKRHQREITRTTLQSDQEEIDYDDTISVEMKKEDFDIYDEDENQ |
| | SPRSFQKKTRHYFIAAVERLWDYGMSSSPHVLRNRAQSGSVPQFKKVVFQEFTDGSFTQPLY |
| | RGELNEHLGLLGPYIRAEVEDNIMVTFRNQASRPYSFYSSLISYEEDQRQGAEPRKNFVKPNE |
| | TKTYFWKVQHHMAPTKDEFDCKAWAYFSDVDLEKDVHSGLIGPLLVCHTNTLNPAHGRQV |
| | TVQEFALFFTIFDETKSWYFTENMERNCRAPCNIQMEDPTFKENYRFHAINGYIMDTLPGLVM |
| | AQDQRIRWYLLSMGSNENIHSIHFSGHVFTVRKKEEYKMALYNLYPGVFETVEMLPSKAGIW |
| | RVECLIGEHLHAGMSTLFLVYSNKCQTPLGMASGHIRDFQITASGQYGQWAPKLARLHYSGS |
| | INAWSTKEPFSWIKVDLLAPMIIHGIKTQGARQKFSSLYISQFIIMYSLDGKKWQTYRGNSTGT |
| | LMVFFGNVDSSGIKHNIFNPPIIARYIRLHPTHYSIRSTLRMELMGCDLNSCSMPLGMESKAISD |
| | AQITASSYFTNMFATWSPSKARLHLQGRSNAWRPQVNNPKEWLQVDFQKTMKVTGVTTQG |
| | VKSLLTSMYVKEFLISSSQDGHQWTLFFQNGKVKVFQGNQDSFTPVVNSLDPPLLTRYLRIHP |
| | QSWVHQIALRMEVLGCEAQDLYGGSPAGSPTSTEEGTSESATPESGPGTSTEPSEGSAPGSPA |
| | GSPTSTEEGTSTEPSEGSAPGTSTEPSEGSAPGTSESATPESGPGSEPATSGSETPGSEPATSGSE |
| | TPGSPAGSPTSTEEGTSESATPESGPGTSTEPSEGSAPGTSTEPSEGSAPGSPAGSPTSTEEGTST |
| | EPSEGSAPGTSTEPSEGSAPGTSESATPESGPGTSTEPSEGSAPGTSESATPESGPGSEPATSGSE |
| | TPGTSTEPSEGSAPGTSTEPSEGSAPGTSESATPESGPGTSESATPESGPGSPAGSPTSTEEGTSES |
| | ATPESGPGSEPATSGSETPGTSESATPESGPGTSTEPSEGSAPGTSTEPSEGSAPGTSTEPSEGSA |
| | PGTSTEPSEGSAPGTSTEPSEGSAPGTSTEPSEGSAPGSPAGSPTSTEEGTSTEPSEGSAPGTSES |
| | ATPESGPGSEPATSGSETPGTSESATPESGPGSEPATSGSETPGTSESATPESGPGTSTEPSEGSA |
| | PGTSESATPESGPGSPAGSPTSTEEGSPAGSPTSTEEGSPAGSPTSTEEGTSESATPESGPGTSTEP |
| | SEGSAPGTSESATPESGPGSEPATSGSETPGTSESATPESGPGSEPATSGSETPGTSESATPESGP |
| | GTSTEPSEGSAPGSPAGSPTSTEEGTSESATPESGPGSEPATSGSETPGTSESATPESGPGSPAGS |
| | PTSTEEGSPAGSPTSTEEGTSTEPSEGSAPGTSESATPESGPGTSESATPESGPGTSESATPESGP |
| | GSEPATSGSETPGSEPATSGSETPGSPAGSPTSTEEGTSTEPSEGSAPGTSTEPSEGSAPGSEPAT |
| | SGSETPGTSESATPESGPGTSTEPSEGSAP |
| AE144- | GSEPATSGSETPGTSESATPESGPGSEPATSGSETPGSPAGSPTSTEEGTSTEPSEGSAPGSEPAT |
| FVIII | SGSETPGSEPATSGSETPGSEPATSGSETPGTSTEPSEGSAPGTSESATPESGPGSEPATSGSETP |
| BDD2- | GTSTEPSEGSAPGATRRYYLGAVELSWDYMQSDLGELPVDARFPPRVPKSFPFNTSVVYKKT |
| Y2332- | LFVEFTVHLFNIAKPRPPWMGLLGPTIQAEVYDTVVITLKNMASHPVSLHAVGVSYWKASEG |
| Thrombin- | AEYDDQTSQREKEDDKVFPGGSHTYVWQVLKENGPMASDPLCLTYSYLSHVDLVKDLNSGL |
| AE864 | IGALLVCREGSLAKEKTQTLHKFILLFAVFDEGKSWHSETKNSLMQDRDAASARAWPKMHT |
| | VNGYVNRSLPGLIGCHRKSVYWHVIGMGTTPEVHSIFLEGHTFLVRNHRQASLEISPITFLTAQ |
| | TLLMDLGQFLLFCHISSHQHDGMEAYVKVDSCPEEPQLRMKNNEEAEDYDDDLTDSEMDVV |
| | RFDDDNSPSFIQIRSVAKKHPKTWVHYIAAEEEDWDYAPLVLAPDDRSYKSQYLNNGPQRIG |
| | RKYKKVRFMAYTDETFKTREAIQHESGILGPLLYGEVGDTLLIIFKNQASRPYNIYPHGITDVR |
| | PLYSRRLPKGVKHLKDFPILPGEIFKYKWTVTVEDGPTKSDPRCLTRYYSSFVNMERDLASGL |
| | IGPLLICYKESVDQRGNQIMSDKRNVILFSVFDENRSWYLTENIQRFLPNPAGVQLEDPEFQAS |
| | NIMHSINGYVFDSLQLSVCLHEVAYWYILSIGAQTDFLSVFFSGYTFKHKMVYEDTLTLFPFS |
| | GETVFMSMENPGLWILGCHNSDFRNRGMTALLKVSSCDKNTGDYYEDSYEDISAYLLSKNN |
| | AIEPRSFSQNPPVLKRHQREITRTTLQSDQEEIDYDDTISVEMKKEDFDIYDEDENQSPRSFQKK |
| | TRHYFIAAVERLWDYGMSSSPHVLRNRAQSGSVPQFKKVVFQEFTDGSFTQPLYRGELNEHL |
| | GLLGPYIRAEVEDNIMVTFRNQASRPYSFYSSLISYEEDQRQGAEPRKNFVKPNETKTYFWKV |
| | QHHMAPTKDEFDCKAWAYFSDVDLEKDVHSGLIGPLLVCHTNTLNPAHGRQVTVQEFALFF |
| | TIFDETKSWYFTENMERNCRAPCNIQMEDPTFKENYRFHAINGYIMDTLPGLVMAQDQRIRW |
| | YLLSMGSNENIHSIHFSGHVFTVRKKEEYKMALYNLYPGVFETVEMLPSKAGIWRVECLIGEH |
| | LHAGMSTLFLVYSNKCQTPLGMASGHIRDFQITASGQYGQWAPKLARLHYSGSINAWSTKEP |
| | FSWIKVDLLAPMIIHGIKTQGARQKFSSLYISQFIIMYSLDGKKWQTYRGNSTGTLMVFFGNV |
| | DSSGIKHNIFNPPIIARYIRLHPTHYSIRSTLRMELMGCDLNSCSMPLGMESKAISDAQITASSYF |
| | TNMFATWSPSKARLHLQGRSNAWRPQVNNPKEWLQVDFQKTMKVTGVTTQGVKSLLTSM |
| | YVKEFLISSSQDGHQWTLFFQNGKVKVFQGNQDSFTPVVNSLDPPLLTRYLRIHPQSWVHQIA |
| | LRMEVLGCEAQDLYGLTPRSLLVGGSPAGSPTSTEEGTSESATPESGPGTSTEPSEGSAPGSPA |
| | GSPTSTEEGTSTEPSEGSAPGTSTEPSEGSAPGTSESATPESGPGSEPATSGSETPGSEPATSGSE |
| | TPGSPAGSPTSTEEGTSESATPESGPGTSTEPSEGSAPGTSTEPSEGSAPGSPAGSPTSTEEGTST |
| | EPSEGSAPGTSTEPSEGSAPGTSESATPESGPGTSTEPSEGSAPGTSESATPESGPGSEPATSGSE |
| | TPGTSTEPSEGSAPGTSTEPSEGSAPGTSESATPESGPGTSESATPESGPGSPAGSPTSTEEGTSES |
| | ATPESGPGSEPATSGSETPGTSESATPESGPGTSTEPSEGSAPGTSTEPSEGSAPGTSTEPSEGSA |
| | PGTSTEPSEGSAPGTSTEPSEGSAPGTSTEPSEGSAPGSPAGSPTSTEEGTSTEPSEGSAPGTSES |
| | ATPESGPGSEPATSGSETPGTSESATPESGPGSEPATSGSETPGTSESATPESGPGTSTEPSEGSA |
| | PGTSESATPESGPGSPAGSPTSTEEGSPAGSPTSTEEGSPAGSPTSTEEGTSESATPESGPGTSTEP |
| | SEGSAPGTSESATPESGPGSEPATSGSETPGTSESATPESGPGSEPATSGSETPGTSESATPESGP |
| | GTSTEPSEGSAPGSPAGSPTSTEEGTSESATPESGPGSEPATSGSETPGTSESATPESGPGSPAGS |
| | PTSTEEGSPAGSPTSTEEGTSTEPSEGSAPGTSESATPESGPGTSESATPESGPGTSESATPESGP |
| | GSEPATSGSETPGSEPATSGSETPGSPAGSPTSTEEGTSTEPSEGSAPGTSTEPSEGSAPGSEPAT |
| | SGSETPGTSESATPESGPGTSTEPSEGSAP |
| AE864- | GSPAGSPTSTEEGTSESATPESGPGTSTEPSEGSAPGSPAGSPTSTEEGTSTEPSEGSAPGTSTEPS |
| FVIII- | EGSAPGTSESATPESGPGSEPATSGSETPGSEPATSGSETPGSPAGSPTSTEEGTSESATPESGPG |
| MMP-17- | TSTEPSEGSAPGTSTEPSEGSAPGSPAGSPTSTEEGTSTEPSEGSAPGTSTEPSEGSAPGTSESATP |
| AE144 | ESGPGTSTEPSEGSAPGTSESATPESGPGSEPATSGSETPGTSTEPSEGSAPGTSTEPSEGSAPGT |
| | SESATPESGPGTSESATPESGPGSPAGSPTSTEEGTSESATPESGPGSEPATSGSETPGTSESATPE |
| | SGPGTSTEPSEGSAPGTSTEPSEGSAPGTSTEPSEGSAPGTSTEPSEGSAPGTSTEPSEGSAPGTS |
| | TEPSEGSAPGSPAGSPTSTEEGTSTEPSEGSAPGTSESATPESGPGSEPATSGSETPGTSESATPES |
| | GPGSEPATSGSETPGTSESATPESGPGTSTEPSEGSAPGTSESATPESGPGSPAGSPTSTEEGSPA |
| | GSPTSTEEGSPAGSPTSTEEGTSESATPESGPGTSTEPSEGSAPGTSESATPESGPGSEPATSGSE |
| | TPGTSESATPESGPGSEPATSGSETPGTSESATPESGPGTSTEPSEGSAPGSPAGSPTSTEEGTSES |
| | ATPESGPGSEPATSGSETPGTSESATPESGPGSPAGSPTSTEEGSPAGSPTSTEEGTSTEPSEGSA |
| | PGTSESATPESGPGTSESATPESGPGTSESATPESGPGSEPATSGSETPGSEPATSGSETPGSPAG |
| | SPTSTEEGTSTEPSEGSAPGTSTEPSEGSAPGSEPATSGSETPGTSESATPESGPGTSTEPSEGSAP |
| | GATRRYYLGAVELSWDYMQSDLGELPVDARFPPRVPKSFPFNTSVVYKKTLFVEFTDHLFNI |
| | AKPRPPWMGLLGPTIQAEVYDTVVITLKNMASHPVSLHAVGVSYWKASEGAEYDDQTSQRE |
| | KEDDKVFPGGSHTYVWQVLKENGPMASDPLCLTYSYLSHVDLVKDLNSGLIGALLVCREGS |
| | LAKEKTQTLHKFILLFAVFDEGKSWHSETKNSLMQDRDAASARAWPKMHTVNGYVNRSLPG |
| | LIGCHRKSVYWHVIGMGTTPEVHSIFLEGHTFLVRNHRQASLEISPITFLTAQTLLMDLGQFLL |
| | FCHISSHQHDGMEAYVKVDSCPEEPQLRMKNNEEAEDYDDDLTDSEMDVVRFDDDNSPSFIQ |
| | IRSVAKKHPKTWVHYIAAEEEDWDYAPLVLAPDDRSYKSQYLNNGPQRIGRKYKKVRFMAY |
| | TDETFKTREAIQHESGILGPLLYGEVGDTLLIIFKNQASRPYNIYPHGITDVRPLYSRRLPKGVK |
| | HLKDFPILPGEIFKYKWTVTVEDGPTKSDPRCLTRYYSSFVNMERDLASGLIGPLLICYKESVD |
| | QRGNQIMSDKRNVILFSVFDENRSWYLTENIQRFLPNPAGVQLEDPEFQASNIMHSINGYVFD |
| | SLQLSVCLHEVAYWYILSIGAQTDFLSVFFSGYTFKHKMVYEDTLTLFPFSGETVFMSMENPG |
| | LWILGCHNSDFRNRGMTALLKVSSCDKNTGDYYEDSYEDISAYLLSKNNAIEPRSFSQNSRHP |
| | STRQKQFNATTIPENDIEKTDPWFAHRTPMPKIQNVSSSDLLMLLRQSPTPHGLSLSDLQEAKY |
| | ETFSDDPSPGAIDSNNSLSEMTHFRPQLHHSGDMVFTPESGLQLRLNEKLGTTAATELKKLDF |
| | KVSSTSNNLISTIPSDNLAAGTDNTSSLGPPSMPVHYDSQLDTTLFGKKSSPLTESGGPLSLSEE |
| | NNDSKLLESGLMNSQESSWGKNVSSTESGRLFKGKRAHGPALLTKDNALFKVSISLLKTNKT |
| | SNNSATNRKTHIDGPSLLIENSPSVWQNILESDTEFKKVTPLIHDRMLMDKNATALRLNHMSN |
| | KTTSSKNMEMVQQKKEGPIPPDAQNPDMSFFKMLFLPESARWIQRTHGKNSLNSGQGPSPKQ |
| | LVSLGPEKSVEGQNFLSEKNKVVVGKGEFTKDVGLKEMVFPSSRNLFLTNLDNLHENNTHNQ |
| | EKKIQEEIEKKETLIQENVVLPQIHTVTGTKNFMKNLFLLSTRQNVEGSYDGAYAPVLQDFRS |
| | LNDSTNRTKKHTAHFSKKGEEENLEGLGNQTKQIVEKYACTTRISPNTSQQNFVTQRSKRAL |
| | KQFRLPLEETELEKRIIVDDTSTQWSKNMKHLTPSTLTQIDYNEKEKGAITQSPLSDCLTRSHSI |
| | PQANRSPLPIAKVSSFPSIRPIYLTRVLFQDNSSHLPAASYRKKDSGVQESSHFLQGAKKNNLS |
| | LAILTLEMTGDQREVGSLGTSATNSVTYKKVENTVLPKPDLPKTSGKVELLPKVHIYQKDLFP |
| | TETSNGSPGHLDLVEGSLLQGTEGAIKWNEANRPGKVPFLRVATESSAKTPSKLLDPLAWDN |
| | HYGTQIPKEEWKSQLKSPEKTAFKKKDTILSLNACESNHAIAAINEGQNKPEIEVTWAKQGRT |
| | ERLCSQNPPVLKRHQREITRTTLQSDQEEIDYDDTISVEMKKEDFDIYDEDENQSPRSFQKKTR |
| | HYFIAAVERLWDYGMSSSPHVLRNRAQSGSVPQFKKVVFQEFTDGSFTQPLYRGELNEHLGL |
| | LGPYIRALVEDNIMVTFRNQASRPYSFYSSLISYEEDQRQGAEPRKNFVKPNETKTYFWKVQH |
| | HMAPTKDEFDCKAWAYFSDVDLEKDVHSGLIGPLLVCHTNTLNPAHGRQVTVQEFALFFTIF |
| | DETKSWYFTENMERNCRAPCNIQMEDPTFKENYRFHAINGYIMDTLPGLVMAQDQRIRWYL |
| | LSMGSNENIHSIHFSGHVFTVRKKEEYKMALYNLYPGVFETVEMLPSKAGIWRVECLIGEHLH |
| | AGMSTLFLVYSNKCQTPLGMASGHIRDFQITASGQYGQWAPKLARLHYSGSINAWSTKEPFS |
| | WIKVDLLAPMIIHGIKTQGARQKFSSLYISQFIIMYSLDGKKWQTYRGNSTGTLMVFFGNVDS |
| | SGIKHNIFNPPIIARYIRLHPTHYSIRSTLRMELMGCDLNSCSMPLGMESKAISDAQITASSYFTN |
| | MFATWSPSKARLHLQGRSNAWRPQVNNPKEWLQVDFQKTMKVTGVTTQGVKSLLTSMYV |
| | KEFLISSSQDGHQWTLFFQNGKVKVFQGNQDSFTPVVNSLDPPLLTRYLRIHPQSWVHQIALR |
| | MEVLGCEAQDLYGAPLGLRLRGGSEPATSGSETPGTSESATPESGPGSEPATSGSETPGSPAGS |
| | PTSTEEGTSTEPSEGSAPGSEPATSGSETPGSEPATSGSETPGSEPATSGSETPGTSTEPSEGSAP |
| | GTSESATPESGPGSEPATSGSETPGTSTEPSEGSAP |
| AF144- | GTSTPESGSASPGTSPSGESSTAPGTSPSGESSTAPGSTSSTAESPGPGSTSESPSGTAPGSTSSTA |
| FXIIa- | ESPGPGTSPSGESSTAPGTSTPESGSASPGSTSSTAESPGPGTSPSGESSTAPGTSPSGESSTAPGT |
| FVIII- | SPSGESSTAPGTMTRIVGGATRRYYLGAVELSWDYMQSDLGELPVDARFPPRVPKSFPFNTSV |
| FXIIa- | VYKKTLFVEFTDHLFNIAKPRPPWMGLLGPTIQAEVYDTVVITLKNMASHPVSLHAVGVSYW |
| AF864 | KASEGAEYDDQTSQREKEDDKVFPGGSHTYVWQVLKENGPMASDPLCLTYSYLSHVDLVK |
| | DLNSGLIGALLVCREGSLAKEKTQTLHKFILLFAVFDEGKSWHSETKNSLMQDRDAASARAW |
| | PKMHTVNGYVNRSLPGLIGCHRKSVYWHVIGMGTTPEVHSIFLEGHTFLVRNHRQASLEISPI |
| | TFLTAQTLLMDLGQFLLFCHISSHQHDGMEAYVKVDSCPEEPQLRMKNNEEAEDYDDDLTD |
| | SEMDVVRFDDDNSPSFIQIRSVAKKHPKTWVHYIAAEEEDWDYAPLVLAPDDRSYKSQYLNN |
| | GPQRIGRKYKKVRFMAYTDETFKTREAIQHESGILGPLLYGEVGDTLLIIFKNQASRPYNIYPH |
| | GITDVRPLYSRRLPKGVKHLKDFPILPGEIFKYKWTVTVEDGPTKSDPRCLTRYYSSFVNMER |
| | DLASGLIGPLLICYKESVDQRGNQIMSDKRNVILFSVFDENRSWYLTENIQRFLPNPAGVQLED |
| | PEFQASNIMHSINGYVFDSLQLSVCLHEVAYWYILSIGAQTDFLSVFFSGYTFKHKMVYEDTL |
| | TLFPFSGETVFMSMENPG/LWILGCHNSDFRNRGMTALLKVSSCDKNTGDYYEDSYEDISAYL |
| | LSKNNAIEPRSFSQNSRHPSTRQKQFNATTIPENDIEKTDPWFAHRTPMPKIQNVSSSDLLMLL |
| | RQSPTPHGLSLSDLQEAKYETFSDDPSPGAIDSNNSLSEMTHFRPQLHHSGDMVFTPESGLQLR |
| | LNEKLGTTAATELKKLDFKVSSTSNNLISTIPSDNLAAGTDNTSSLGPPSMPVHYDSQLDTTLF |
| | GKKSSPLTESGGPLSLSEENNDSKLLESGLMNSQESSWGKNVSSTESGRLFKGKRAHGPALLT |
| | KDNALFKVSISLLKTNKTSNNSATNRKTHIDGPSLLIENSPSVWQNILESDTEFKKVTPLIHDR |
| | MLMDKNATALRLNHMSNKTTSSKNMEMVQQKKEGPIPPDAQNPDMSFFKMLFLPESARWIQ |
| | RTHGKNSLNSGQGPSPKQLVSLGPEKSVEGQNFLSEKNKVVVGKGEFTKDVGLKEMVFPSSR |
| | NLFLTNLDNLHENNTHNQEKKIQEEIEKKETLIQENVVLPQIHTVTGTKNFMKNLFLLSTRQN |
| | VEGSYDGAYAPVLQDFRSLNDSTNRTKKHTAHFSKKGEEENLEGLGNQTKQIVEKYACTTRI |
| | SPNTSQQNFVTQRSKRALKQFRLPLEETELEKRIIVDDTSTQWSKNMKHLTPSTLTQIDYNEKE |
| | KGAITQSPLSDCLTRSHSIPQANRSPLPIAKVSSFPSIRPIYLTRVLFQDNSSHLPAASYRKKDSG |
| | VQESSHFLQGAKKNNLSLAILTLEMTGDQREVGSLGTSATNSVTYKKVENTVLPKPDLPKTS |
| | GKVELLPKVHIYQKDLFPTETSNGSPGHLDLVEGSLLQGTEGAIKWNEANRPGKVPFLRVATE |
| | SSAKTPSKLLDPLAWDNHYGTQIPKEEWKSQEKSPEKTAFKKKDTILSLNACESNHAIAAINE |
| | GQNKPEIEVTWAKQGRTERLCSQNPPVLKRHQREITRTTLQSDQEEIDYDDTISVEMKKEDFD |
| | IYDEDENQSPRSFQKKTRHYFIAAVERLWDYGMSSSPHVLRNRAQSGSVPQFKKVVFQEFTD |
| | GSFTQPLYRGELNEHLGLLGPYIRAEVEDNIMVTFRNQASRPYSFYSSLISYEEDQRQGAEPRK |
| | NFVKPNETKTYFWKVQHHMAPTKDEFDCKAWAYFSDVDLEKDVHSGLIGPLLVCHTNTLNP |
| | AHGRQVTVQEFALFFTIFDETKSWYFTENMERNCRAPCNIQMEDPTFKENYRFHAINGYIMD |
| | TLPGLVMAQDQRIRWYLLSMGSNENIHSIHFSGHVFTVRKKEEYKMALYNLYPGVFETVEML |
| | PSKAGIWRVECLIGEHLHAGMSTLFLVYSNKCQTPLGMASGHIRDFQITASGQYGQWAPKLA |
| | RLHYSGSINAWSTKEPFSWIKVDLLAPMIIHGIKTQGARQKFSSLYISQFIIMYSLDGKKWQTY |
| | RGNSTGTLMVFFGNVDSSGIKHNIFNPPIIARYIRLHPTHYSIRSTLRMELMGCDLNSCSMPLG |
| | MESKAISDAQITASSYFTNMFATWSPSKARLHLQGRSNAWRPQVNNPKEWLQVDFQKTMKV |
| | TGVTTQGVKSLLTSMYVKEFLISSSQDGHQWTLFFQNGKVKVFQGNQDSFTPVVNSLDPPLL |
| | TRYLRIHPQSWVHQIALRMEVLGCEAQDLYGTMTRIVGGGSTSESPSGTAPGTSPSGESSTAP |
| | GSTSESPSGTAPGSTSESPSGTAPGTSTPESGSASPGTSTPESGSASPGSTSESPSGTAPGSTSESP |
| | SGTAPGTSPSGESSTAPGSTSESPSGTAPGTSPSGESSTAPGTSPSGESSTAPGSTSSTAESPGPGT |
| | SPSGESSTAPGTSPSGESSTAPGSTSSTAESPGPGTSTPESGSASPGTSTPESGSASPGSTSESPSG |
| | TAPGSTSESPSGTAPGTSTPESGSASPGSTSSTAESPGPGTSTPESGSASPGSTSESPSGTAPGTSP |
| | SGESSTAPGSTSSTAESPGPGTSPSGESSTAPGTSTPESGSASPGSTSSTAESPGPGSTSSTAESPG |
| | PGSTSSTAESPGPGSTSSTAESPGPGTSPSGESSTAPGSTSESPSGTAPGSTSESPSGTAPGTSTPE |
| | SGPXXXGASASGAPSTXXXXSESPSGTAPGSTSESPSGTAPGSTSESPSGTAPGSTSESPSGTAP |
| | GSTSESPSGTAPGSTSESPSGTAPGTSTPESGSASPGTSPSGESSTAPGTSPSGESSTAPGSTSSTA |
| | ESPGPGTSPSGESSTAPGTSTPESGSASPGSTSESPSGTAPGSTSESPSGTAPGTSPSGESSTAPGS |
| | TSESPSGTAPGTSTPESGSASPGTSTPESGSASPGSTSESPSGTAPGTSTPESGSASPGSTSSTAES |
| | PGPGSTSESPSGTAPGSTSESPSGTAPGTSPSGESSTAPGSTSSTAESPGPGTSPSGESSTAPGTST |
| | PESGSASPGTSPSGESSTAPGTSPSGESSTAPGTSPSGESSTAPGSTSSTAESPGPGSTSSTAESPG |
| | PGTSPSGESSTAPGSSPSASTGTGPGSSTPSGATGSPGSSTPSGATGSP |
| AE864- | GSPAGSPTSTEEGTSESATPESGPGTSTEPSEGSAPGSPAGSPTSTEEGTSTEPSEGSAPGTSTEPS |
| FVIII- | EGSAPGTSESATPESGPGSEPATSGSETPGSEPATSGSETPGSPAGSPTSTEEGTSESATPESGPG |
| FXIa- | TSTEPSEGSAPGTSTEPSEGSAPGSPAGSPTSTEEGTSTEPSEGSAPGTSTEPSEGSAPGTSESATP |
| AE144 | ESGPGTSTEPSEGSAPGTSESATPESGPGSEPATSGSETPGTSTEPSEGSAPGTSTEPSEGSAPGT |
| | SESATPESGPGTSESATPESGPGSPAGSPTSTEEGTSESATPESGPGSEPATSGSETPGTSESATPE |
| | SGPGTSTEPSEGSAPGTSTEPSEGSAPGTSTEPSEGSAPGTSTEPSEGSAPGTSTEPSEGSAPGTS |
| | TEPSEGSAPGSPAGSPTSTEEGTSTEPSEGSAPGTSESATPESGPGSEPATSGSETPGTSESATPES |
| | GPGSEPATSGSETPGTSESATPESGPGTSTEPSEGSAPGTSESATPESGPGSPAGSPTSTEEGSPA |
| | GSPTSTEEGSPAGSPTSTEEGTSESATPESGPGTSTEPSEGSAPGTSESATPESGPGSEPATSGSE |
| | TPGTSESATPESGPGSEPATSGSETPGTSESATPESGPGTSTEPSEGSAPGSPAGSPTSTEEGTSES |
| | ATPESGPGSEPATSGSETPGTSESATPESGPGSPAGSPTSTEEGSPAGSPTSTEEGTSTEPSEGSA |
| | PGTSESATPESGPGTSESATPESGPGTSESATPESGPGSEPATSGSETPGSEPATSGSETPGSPAG |
| | SPTSTEEGTSTEPSEGSAPGTSTEPSEGSAPGSEPATSGSETPGTSESATPESGPGTSTEPSEGSAP |
| | GATRRYYLGAVELSWDYMQSDLGELPVDARFPPRVPKSFPFNTSVVYKKTLFVEFTDHLFNI |
| | AKPRPPWMGLLGPTIQAEVYDTVVITLKNMASHPVSLHAVGVSYWKASEGAEYDDQTSQRE |
| | KEDDKVFPGGSHTYVWQVLKENGPMASDPLCLTYSYLSHVDLVKDLNSGLIGALLVCREGS |
| | LAKEKTQTLHKFILLFAVFDEGKSWHSETKNSLMQDRDAASARAWPKMHTVNGYVNRSLPG |
| | LIGCHRKSVYWHVIGMGTTPEVHSIFLEGHTFLVRNHRQASLEISPITFLTAQTLLMDLGQFLL |
| | FCHISSHQHDGMEAYVKVDSCPEEPQLRMKNNEEAEDYDDDLTDSEMDVVRFDDDNSPSFIQ |
| | IRSVAKKHPKTWVHYIAAEEEDWDYAPLVLAPDDRSYKSQYLNNGPQRIGRKYKKVRFMAY |
| | TDETFKTREAIQHESGILGPLLYGEVGDTLLIIFKNQASRPYNIYPHGITDVRPLYSRRLPKGVK |
| | HLKDFPILPGEIFKYKWTVTVEDGPTKSDPRCLTRYYSSFVNMERDLASGLIGPLLICYKESVD |
| | QRGNQIMSDKRNVILFSVFDENRSWYLTENIQRFLPNPAGVQLEDPEFQASNIMHSINGYVFD |
| | SLQLSVCLHEVAYWYILSIGAQTDFLSVFFSGYTFKHKMVYEDTLTLFPFSGETVFMSMENPG |
| | LWILGCHNSDFRNRGMTALLKVSSCDKNTGDYYEDSYEDISAYLLSKNNAIEPRSFSQNSRHP |
| | STRQKQFNATTIPENDIEKTDPWFAHRTPMPKIQNVSSSDLLMLLRQSPTPHGLSLSDLQEAKY |
| | ETFSDDPSPGAIDSNNSLSEMTHFRPQLHHSGDMVFTPESGLQLRLNEKLGTTAATELKKLDF |
| | KVSSTSNNLISTIPSDNLAAGTDNTSSLGPPSMPVHYDSQLDTTLFGKKSSPLTESGGPLSLSEE |
| | NNDSKLLESGLMNSQESSWGKNVSSTESGRLFKGKRAHGPALLTKDNALFKVSISLLKTNKT |
| | SNNSATNRKTHIDGPSLLIENSPSVWQNILESDTEFKKVTPLIHDRMLMDKNATALRLNHMSN |
| | KTTSSKNMEMVQQKKEGPIPPDAQNPDMSFFKMLFLPESARWIQRTHGKNSLNSGQGPSPKQ |
| | LVSLGPEKSVEGQNFLSEKNKVVVGKGEFTKDVGLKEMVFPSSRNLFLTNLDNLHENNTHNQ |
| | EKKIQEEIEKKETLIQENVVLPQIHTVTGTKNFMKNLFLLSTRQNVEGSYDGAYAPVLQDFRS |
| | LNDSTNRTKKHTAHFSKKGEEENLEGLGNQTKQIVEKYACTTRISPNTSQQNFVTQRSKRAL |
| | KQFRLPLEETELEKRIIVDDTSTQWSKNMKHLTPSTLTQIDYNEKEKGAITQSPLSDCLTRSHSI |
| | PQANRSPLPIAKVSSFPSIRPIYLTRVLFQDNSSHLPAASYRKKDSGVQESSHFLQGAKKNNLS |
| | LAILTLEMTGDQREVGSLGTSATNSVTYKKVENTVLPKPDLPKTSGKVELLPKVHIYQKDLFP |
| | TETSNGSPGHLDLVEGSLLQGTEGAIKWNEANRPGKVPFLRVATESSAKTPSKLLDPLAWDN |
| | HYGTQIPKEEWKSQEKSPEKTAFKKKDTILSLNACESNHAIAAINEGQNKPEIEVTWAKQGRT |
| | ERLCSQNPPVLKRHQREITRTTLQSDQEEIDYDDTISVEMKKEDFDIYDEDENQSPRSFQKKTR |
| | HYFIAAVERLWDYGMSSSPHVLRNRAQSGSVPQFKKVVFQEFTDGSFTQPLYRGELNEHLGL |
| | LGPYIRAEVEDNIMVTFRNQASRPYSFYSSLISYEEDQRQGAEPRKNFVKPNETKTYFWKVQH |
| | HMAPTKDEFDCKAWAYFSDVDLEKDVHSGLIGPLLVCHTNTLNPAHGRQVTVQEFALFFTIF |
| | DETKSWYFTENMERNCRAPCNIQMEDPTFKENYRFHAINGYIMDTLPGLVMAQDQRIRWYL |
| | LSMGSNENIHSIHFSGHVFTVRKKEEYKMALYNLYPGVFETVEMLPSKAGIWRVECLIGEHLH |
| | AGMSTLFLVYSNKCQTPLGMASGHIRDFQITASGQYGQWAPKLARLHYSGSINAWSTKEPFS |
| | WIKVDLLAPMIIHGIKTQGARQKFSSLYISQFIIMYSLDGKKWQTYRGNSTGTLMVFFGNVDS |
| | SGIKHNIFNPPIIARYIRLHPTHYSIRSTLRMELMGCDLNSCSMPLGMESKAISDAQITASSYFTN |
| | MFATWSPSKARLHLQGRSNAWRPQVNNPKEWLQVDFQKTMKVTGVTTQGVKSLLTSMYV |
| | KEFLISSSQDGHQWTLFFQNGKVKVFQGNQDSFTPVVNSLDPPLLTRYLRIHPQSWVHQIALR |
| | MEVLGCEAQDLYGKLTRAETGGSEPATSGSETPGTSESATPESGPGSEPATSGSETPGSPAGSP |
| | TSTEEGTSTEPSEGSAPGSEPATSGSETPGSEPATSGSETPGSEPATSGSETPGTSTEPSEGSAPG |
| | TSESATPESGPGSEPATSGSETPGTSTEPSEGSAP |
| AE144- | GSEPATSGSETPGTSESATPESGPGSEPATSGSETPGSPAGSPTSTEEGTSTEPSEGSAPGSEPAT |
| FXIa-FVIII | SGSETPGSEPATSGSETPGSEPATSGSETPGTSTEPSEGSAPGTSESATPESGPGSEPATSGSETP |
| BDD9- | GTSTEPSEGSAPGKLTRAETGATRRYYLGAVELSWDYMQSDLGELPVDARFPPRVPKSFPFNT |
| AE864 | SVVYKKTLFVEFTDHLFNIAKPRPPWMGLLGPTIQAEVYDTVVITLKNMASHPVSLHAVGVS |
| | YWKASEGAEYDDQTSQREKEDDKVFPGGSHTYVWQVLKENGPMASDPLCLTYSYLSHVDL |
| | VKDLNSGLIGALLVCREGSLAKEKTQTLHKFILLFAVFDEGKSWHSETKNSLMQDRDAASAR |
| | AWPKMHTVNGYVNRSLPGLIGCHRKSVYWHVIGMGTTPEVHSIFLEGHTFLVRNHRQASLEI |
| | SPITFLTAQTLLMDLGQFLLFCHISSHQHDGMEAYVKVDSCPEEPQLRMKNNEEAEDYDDDL |
| | TDSEMDVVRFDDDNSPSFIQIRSVAKKHPKTWVHYIAAEEEDWDYAPLVLAPDDRSYKSQYL |
| | NNGPQRIGRKYKKVRFMAYTDETFKTREAIQHESGILGPLLYGEVGDTLLIIFKNQASRPYNIY |
| | PHGITDVRPLYSRRLPKGVKHLKDFPILPGEIFKYKWTVTVEDGPTKSDPRCLTRYYSSFVNM |
| | ERDLASGLIGPLLICYKESVDQRGNQIMSDKRNVILFSVFDENRSWYLTENIQRFLPNPAGVQL |
| | EDPEFQASNIMHSINGYVFDSLQLSVCLHEVAYWYILSIGAQTDFLSVFFSGYTFKHKMVYED |
| | TLTLFPFSGETVFMSMENPGLWILGCHNSDFRNRGMTALLKVSSCDKNTGDYYEDSYEDISA |
| | YLLSKNNAIEPRSFSQNPPVLKRHQREITRTTLQSDQEEIDYDDTISVEMKKEDFDIYDEDENQ |
| | SPRSFQKKTRHYFIAAVERLWDYGMSSSPHVLRNRAQSGSVPQFKKVVFQEFTDGSFTQPLY |
| | RGELNEHLGLLGPYIRAEVEDNIMVTFRNQASRPYSFYSSLISYEEDQRQGAEPRKNFVKPNE |
| | TKTYFWKVQHHMAPTKDEFDCKAWAYFSDVDLEKDVHSGLIGPLLVCHTNTLNPAHGRQV |
| | TVQEFALFFTIFDETKSWYFTENMERNCRAPCNIQMEDPTFKENYRFHAINGYIMDTLPGLVM |
| | AQDQRIRWYLLSMGSNENIHSIHFSGHVFTVRKKEEYKMALYNLYPGVFETVEMLPSKAGIW |
| | RVECLIGEHLHAGMSTLFLVYSNKCQTPLGMASGHIRDFQITASGQYGQWAPKLARLHYSGS |
| | INAWSTKEPFSWIKVDLLAPMIIHGIKTQGARQKFSSLYISQFIIMYSLDGKKWQTYRGNSTGT |
| | LMVFFGNVDSSGIKHNIFNPPIIARYIRLHPTHYSIRSTLRMELMGCDLNSCSMPLGMESKAISD |
| | AQITASSYFTNMFATWSPSKARLHLQGRSNAWRPQVNNPKEWLQVDFQKTMKVTGVTTQG |
| | VKSLLTSMYVKEFLISSSQDGHQWTLFFQNGKVKVFQGNQDSFTPVVNSLDPPLLTRYLRIHP |
| | QSWVHQIALRMEVLGCEAQDLYGGSPAGSPTSTEEGTSESATPESGPGTSTEPSEGSAPGSPA |
| | GSPTSTEEGTSTEPSEGSAPGTSTEPSEGSAPGTSESATPESGPGSEPATSGSETPGSEPATSGSE |
| | TPGSPAGSPTSTEEGTSESATPESGPGTSTEPSEGSAPGTSTEPSEGSAPGSPAGSPTSTEEGTST |
| | EPSEGSAPGTSTEPSEGSAPGTSESATPESGPGTSTEPSEGSAPGTSESATPESGPGSEPATSGSE |
| | TPGTSTEPSEGSAPGTSTEPSEGSAPGTSESATPESGPGTSESATPESGPGSPAGSPTSTEEGTSES |
| | ATPESGPGSEPATSGSETPGTSESATPESGPGTSTEPSEGSAPGTSTEPSEGSAPGTSTEPSEGSA |
| | PGTSTEPSEGSAPGTSTEPSEGSAPGTSTEPSEGSAPGSPAGSPTSTEEGTSTEPSEGSAPGTSES |
| | ATPESGPGSEPATSGSETPGTSESATPESGPGSEPATSGSETPGTSESATPESGPGTSTEPSEGSA |
| | PGTSESATPESGPGSPAGSPTSTEEGSPAGSPTSTEEGSPAGSPTSTEEGTSESATPESGPGTSTEP |
| | SEGSAPGTSESATPESGPGSEPATSGSETPGTSESATPESGPGSEPATSGSETPGTSESATPESGP |
| | GTSTEPSEGSAPGSPAGSPTSTEEGTSESATPESGPGSEPATSGSETPGTSESATPESGPGSPAGS |
| | PTSTEEGSPAGSPTSTEEGTSTEPSEGSAPGTSESATPESGPGTSESATPESGPGTSESATPESGP |
| | GSEPATSGSETPGSEPATSGSETPGSPAGSPTSTEEGTSTEPSEGSAPGTSTEPSEGSAPGSEPAT |
| | SGSETPGTSESATPESGPGTSTEPSEGSAP |
| AE48- | MAEPAGSPTSTEEGTPGSGTASSSPGSSTPSGATGSPGASPGTSSTGSPGKLTRAETGATRRYY |
| FXIa-FVIII | LGAVELSWDYMQSDLGELPVDARFPPRVPKSFPFNTSVVYKKTLFVEFTDHLFNIAKPRPPW |
| BDD9- | MGLLGPTIQAEVYDTVVITLKNMASHPVSLHAVGVSYWKASEGAEYDDQTSQREKEDDKVF |
| AE864 | PGGSHTYVWQVLKENGPMASDPLCLTYSYLSHVDLVKDLNSGLIGALLVCREGSLAKEKTQ |
| | TLHKFILLFAVFDEGKSWHSETKNSLMQDRDAASARAWPKMHTVNGYVNRSLPGLIGCHRK |
| | SVYWHVIGMGTTPEVHSIFLEGHTFLVRNHRQASLEISPITFLTAQTLLMDLGQFLLFCHISSH |
| | QHDGMEAYVKVDSCPEEPQLRMKNNEEAEDYDDDLTDSEMDVVRFDDDNSPSFIQIRSVAK |
| | KHPKTWVHYIAAEEEDWDYAPLVLAPDDRSYKSQYLNNGPQRIGRKYKKVRFMAYTDETF |
| | KTREAIQHESGILGPLLYGEVGDTLLIIFKNQASRPYNIYPHGITDVRPLYSRRLPKGVKHLKDF |
| | PILPGEIFKYKWTVTVEDGPTKSDPRCLTRYYSSFVNMERDLASGLIGPLLICYKESVDQRGNQ |
| | IMSDKRNVILFSVFDENRSWYLTENIQRFLPNPAGVQLEDPEFQASNIMHSINGYVFDSLQLSV |
| | CLHEVAYWYILSIGAQTDFLSVFFSGYTFKHKMVYEDTLTLFPFSGETVFMSMENPGLWILGC |
| | HNSDFRNRGMTALLKVSSCDKNTGDYYEDSYEDISAYLLSKNNAIEPRSFSQNPPVLKRHQRE |
| | ITRTTLQSDQEEIDYDDTISVEMKKEDFDIYDEDENQSPRSFQKKTRHYFIAAVERLWDYGMS |
| | SSPHVLRNRAQSGSVPQFKKVVFQEFTDGSFTQPLYRGELNEHLGLLGPYIRAEVEDNIMVTF |
| | RNQASRPYSFYSSLISYEEDQRQGAEPRKNFVKPNETKTYFWKVQHHMAPTKDEFDCKAWA |
| | YFSDVDLEKDVHSGLIGPLLVCHTNTLNPAHGRQVTVQEFALFFTIFDETKSWYFTENMERNC |
| | RAPCNIQMEDPTFKENYRFHAINGYIMDTLPGLVMAQDQRIRWYLLSMGSNENIHSIHFSGHV |
| | FTVRKKEEYKMALYNLYPGVFETVEMLPSKAGIWRVECLIGEHLHAGMSTLFLVYSNKCQTP |
| | LGMASGHIRDFQITASGQYGQWAPKLARLHYSGSINAWSTKEPFSWIKVDLLAPMIIHGIKTQ |
| | GARQKFSSLYISQFIIMYSLDGKKWQTYRGNSTGTLMVFFGNVDSSGIKHNIFNPPIIARYIRLH |
| | PTHYSIRSTLRMELMGCDLNSCSMPLGMESKAISDAQITASSYFTNMFATWSPSKARLHLQGR |
| | SNAWRPQVNNPKEWLQVDFQKTMKVTGVTTQGVKSLLTSMYVKEFLISSSQDGHQWTLFFQ |
| | NGKVKVFQGNQDSFTPVVNSLDPPLLTRYLRIHPQSWVHQIALRMEVLGCEAQDLYGGSPAG |
| | SPTSTEEGTSESATPESGPGTSTEPSEGSAPGSPAGSPTSTEEGTSTEPSEGSAPGTSTEPSEGSAP |
| | GTSESATPESGPGSEPATSGSETPGSEPATSGSETPGSPAGSPTSTEEGTSESATPESGPGTSTEPS |
| | EGSAPGTSTEPSEGSAPGSPAGSPTSTEEGTSTEPSEGSAPGTSTEPSEGSAPGTSESATPESGPG |
| | TSTEPSEGSAPGTSESATPESGPGSEPATSGSETPGTSTEPSEGSAPGTSTEPSEGSAPGTSESATP |
| | ESGPGTSESATPESGPGSPAGSPTSTEEGTSESATPESGPGSEPATSGSETPGTSESATPESGPGT |
| | STEPSEGSAPGTSTEPSEGSAPGTSTEPSEGSAPGTSTEPSEGSAPGTSTEPSEGSAPGTSTEPSEG |
| | SAPGSPAGSPTSTEEGTSTEPSEGSAPGTSESATPESGPGSEPATSGSETPGTSESATPESGPGSE |
| | PATSGSETPGTSESATPESGPGTSTEPSEGSAPGTSESATPESGPGSPAGSPTSTEEGSPAGSPTS |
| | TEEGSPAGSPTSTEEGTSESATPESGPGTSTEPSEGSAPGTSESATPESGPGSEPATSGSETPGTS |
| | ESATPESGPGSEPATSGSETPGTSESATPESGPGTSTEPSEGSAPGSPAGSPTSTEEGTSESATPES |
| | GPGSEPATSGSETPGTSESATPESGPGSPAGSPTSTEEGSPAGSPTSTEEGTSTEPSEGSAPGTSE |
| | SATPESGPGTSESATPESGPGTSESATPESGPGSEPATSGSETPGSEPATSGSETPGSPAGSPTST |
| | EEGTSTEPSEGSAPGTSTEPSEGSAPGSEPATSGSETPGTSESATPESGPGTSTEPSEGSAP |
| FVIII | ATRRYYLGAVELSWDYMQSDLGELPVDARFPPRVPKSFPFNTSVVYKKTLFVEFTDHLFNIA |
| BDD9- | KPRPPWMGLLGPTIQAEVYDTVVITLKNMASHPVSLHAVGVSYWKASEGAEYDDQTSQREK |
| FXIa- | EDDKVFPGGSHTYVWQVLKENGPMASDPLCLTYSYLSHVDLVKDLNSGLIGALLVCREGSL |
| AG288_2 | AKEKTQTLHKFILLFAVFDEGKSWHSETKNSLMQDRDAASARAWPKMHTVNGYVNRSLPGL |
| | IGCHRKSVYWHVIGMGTTPEVHSIFLEGHTFLVRNHRQASLEISPITFLTAQTLLMDLGQFLLF |
| | CHISSHQHDGMEAYVKVDSCPEEPQLRMKNNEEAEDYDDDLTDSEMDVVRFDDDNSPSFIQI |
| | RSVAKKHPKTWVHYIAAEEEDWDYAPLVLAPDDRSYKSQYLNNGPQRIGRKYKKVRFMAY |
| | TDETFKTREAIQHESGILGPLLYGEVGDTLLIIFKNQASRPYNIYPHGITDVRPLYSRREPKGVK |
| | HLKDFPILPGEIFKYKWTVTVEDGPTKSDPRCLTRYYSSFVNMERDLASGLIGPLLICYKESVD |
| | QRGNQIMSDKRNVILFSVFDENRSWYLTENIQRFLPNPAGVQLEDPEFQASNIMHSINGYVFD |
| | SLQLSVCLHEVAYWYILSIGAQTDFLSVFFSGYTFKHKMVYEDTLTLFPFSGETVFMSMENPG |
| | LWILGCHNSDFRNRGMTALLKVSSCDKNTGDYYEDSYEDISAYLLSKNNAIEPRSFSQNPPVL |
| | KRHQREITRTTLQSDQEEIDYDDTISVEMKKEDFDIYDEDENQSPRSFQKKTRHYFIAAVERL |
| | WDYGMSSSPHVLRNRAQSGSVPQFKKVVFQEFTDGSFTQPLYRGELNEHLGLLGPYIRAEVE |
| | DNIMVTFRNQASRPYSFYSSLISYEEDQRQGAEPRKNFVKPNETKTYFWKVQHHMAPTKDEF |
| | DCKAWAYFSDVDLEKDVHSGLIGPLLVCHTNTLNPAHGRQVTVQEFALFFTIFDETKSWYFT |
| | ENMERNCRAPCNIQMEDPTFKENYRFHAINGYIMDTLPGLVMAQDQRIRWYLLSMGSNENIH |
| | SIHFSGHVFTVRKKEEYKMALYNLYPGVFETVEMLPSKAGIWRVECLIGEHLHAGMSTLFLV |
| | YSNKCQTPLGMASGHIRDFQITASGQYGQWAPKLARLHYSGSINAWSTKEPFSWIKVDLLAP |
| | MIIHGIKTQGARQKFSSLYISQFIIMYSLDGKKWQTYRGNSTGTLMVFFGNVDSSGIKHNIFNP |
| | PHARYIRLHPTHYSIRSTLRMELMGCDLNSCSMPLGMESKAISDAQITASSYFTNMFATWSPS |
| | KARLHLQGRSNAWRPQVNNPKEWLQVDFQKTMKVTGVTTQGVKSLLTSMYVKEFLISSSQD |
| | GHQWTLFFQNGKVKVFQGNQDSFTPVVNSLDPPLLTRYLRIHPQSWVHQIALRMEVLGCEA |
| | QDLYKLTRAETGPGASPGTSSTGSPGASPGTSSTGSPGTPGSGTASSSPGSSTPSGATGSPGTPG |
| | SGTASSSPGSSTPSGATGSPGTPGSGTASSSPGSSTPSGATGSPGSSTPSGATGSPGSSPSASTGT |
| | GPGSSPSASTGTGPGASPGTSSTGSPGTPGSGTASSSPGSSTPSGATGSPGSSPSASTGTGPGSSP |
| | SASTGTGPGASPGTSSTGSPGASPGTSSTGSPGSSTPSGATGSPGSSPSASTGTGPGASPGTSSTG |
| | SPGSSPSASTGTGPGTPGSGTASSSPGSSTPSGATGS |
| FVIII | ATRRYYLGAVELSWDYMQSDLGELPVDARFPPRVPKSFPFNTSVVYKKTLFVEFTDHLFNIA |
| BDD9- | KPRPPWMGLLGPTIQAEVYDTVVITLKNMASHPVSLHAVGVSYWKASEGAEYDDQTSQREK |
| FXIa- | EDDKVFPGGSHTYVWQVLKENGPMASDPLCLTYSYLSHVDLVKDLNSGLIGALLVCREGSL |
| AG864 | AKEKTQTLHKFILLFAVFDEGKSWHSETKNSLMQDRDAASARAWPKMHTVNGYVNRSLPGL |
| | IGCHRKSVYWHVIGMGTTPEVHSIFLEGHTFLVRNHRQASLEISPITFLTAQTLLMDLGQFLLF |
| | CHISSHQHDGMEAYVKVDSCPEEPQLRMKNNEEAEDYDDDLTDSEMDVVRFDDDNSPSFIQI |
| | RSVAKKHPKTWVHYIAAEEEDWDYAPLVLAPDDRSYKSQYLNNGPQRIGRKYKKVRFMAY |
| | TDETFKTREAIQHESGILGPLLYGEVGDTLLIIFKNQASRPYNIYPHGITDVRPLYSRREPKGVK |
| | HLKDFPILPGEIFKYKWTVTVEDGPTKSDPRCLTRYYSSFVNMERDLASGLIGPLLICYKESVD |
| | QRGNQIMSDKRNVILFSVFDENRSWYLTENIQRFLPNPAGVQLEDPEFQASNIMHSINGYVFD |
| | SLQLSVCLHEVAYWYILSIGAQTDFLSVFFSGYTFKHKMVYEDTLTLFPFSGETVFMSMENPG |
| | LWILGCHNSDFRNRGMTALLKVSSCDKNTGDYYEDSYEDISAYLLSKNNAIEPRSFSQNPPVL |
| | KRHQREITRTTLQSDQEEIDYDDTISVEMKKEDFDIYDEDENQSPRSFQKKTRHYFIAAVERL |
| | WDYGMSSSPHVLRNRAQSGSVPQFKKVVFQEFTDGSFTQPLYRGELNEHLGLLGPYIRAEVE |
| | DNIMVTFRNQASRPYSFYSSLISYEEDQRQGAEPRKNFVKPNETKTYFWKVQHHMAPTKDEF |
| | DCKAWAYFSDVDLEKDVHSGLIGPLLVCHTNTLNPAHGRQVTVQEFALFFTIFDETKSWYFT |
| | ENMERNCRAPCNIQMEDPTFKENYRFHAINGYIMDTLPGLVMAQDQRIRWYLLSMGSNENIH |
| | SIHFSGHVFTVRKKEEYKMALYNLYPGVFETVEMLPSKAGIWRVECLIGEHLHAGMSTLFLV |
| | YSNKCQTPLGMASGHIRDFQITASGQYGQWAPKLARLHYSGSINAWSTKEPFSWIKVDLLAP |
| | MIIHGIKTQGARQKFSSLYISQFIIMYSLDGKKWQTYRGNSTGTLMVFFGNVDSSGIKHNIFNP |
| | PIIARYIRLHPTHYSIRSTLRMELMGCDLNSCSMPLGMESKAISDAQITASSYFTNMFATWSPS |
| | KARLHLQGRSNAWRPQVNNPKEWLQVDFQKTMKVTGVTTQGVKSLLTSMYVKEFLISSSQD |
| | GHQWTLFFQNGKVKVFQGNQDSFTPVVNSLDPPLLTRYLRIHPQSWVHQIALRMEVLGCEA |
| | QDLYKLTRAETGGASPGTSSTGSPGSSPSASTGTGPGSSPSASTGTGPGTPGSGTASSSPGSSTP |
| | SGATGSPGSSPSASTGTGPGASPGTSSTGSPGTPGSGTASSSPGSSTPSGATGSPGTPGSGTASSS |
| | PGASPGTSSTGSPGASPGTSSTGSPGTPGSGTASSSPGSSTPSGATGSPGASPGTSSTGSPGTPGS |
| | GTASSSPGSSTPSGATGSPGSSPSASTGTGPGSSPSASTGTGPGSSTPSGATGSPGSSTPSGATGS |
| | PGASPGTSSTGSPGASPGTSSTGSPGASPGTSSTGSPGTPGSGTASSSPGASPGTSSTGSPGASPG |
| | TSSTGSPGASPGTSSTGSPGSSPSASTGTGPGTPGSGTASSSPGASPGTSSTGSPGASPGTSSTGS |
| | PGASPGTSSTGSPGSSTPSGATGSPGSSTPSGATGSPGASPGTSSTGSPGTPGSGTASSSPGSSTP |
| | SGATGSPGSSTPSGATGSPGSSTPSGATGSPGSSPSASTGTGPGASPGTSSTGSPGASPGTSSTGS |
| | PGTPGSGTASSSPGASPGTSSTGSPGASPGTSSTGSPGASPGTSSTGSPGASPGTSSTGSPGTPGS |
| | GTASSSPGSSTPSGATGSPGTPGSGTASSSPGSSTPSGATGSPGTPGSGTASSSPGSSTPSGATGS |
| | PGSSTPSGATGSPGSSPSASTGTGPGSSPSASTGTGPGASPGTSSTGSPGTPGSGTASSSPGSSTP |
| | SGATGSPGSSPSASTGTGPGSSPSASTGTGPGASPGTSSTGSPGASPGTSSTGSPGSSTPSGATGS |
| | PGSSPSASTGTGPGASPGTSSTGSPGSSPSASTGTGPGTPGSGTASSSPGSSTPSGATGSPGSSTP |
| | SGATGSPGASPGTSSTGSP |
| FVIII | ATRRYYLGAVELSWDYMQSDLGELPVDARFPPRVPKSFPFNTSVVYKKTLFVEFTDHLFNIA |
| BDD9 (1- | KPRPPWMGLLGPTIQAEVYDTVVITLKNMASHPVSLHAVGVSYWKASEGAEYDDQTSQREK |
| 745) | EDDKVFPGGSHTYVWQVLKENGPMASDPLCLTYSYLSHVDLVKDLNSGLIGALLVCREGSL |
| AG288_2- | AKEKTQTLHKFILLFAVFDEGKSWHSETKNSLMQDRDAASARAWPKMHTVNGYVNRSLPGL |
| (1640- | IGCHRKSVYWHVIGMGTTPEVHSIFLEGHTFLVRNHRQASLEISPITFLTAQTLLMDLGQFLLF |
| Y2332)- | CHISSHQHDGMEAYVKVDSCPEEPQLRMKNNEEAEDYDDDLTDSEMDVVRFDDDNSPSFIQI |
| FXIa- | RSVAKKHPKTWVHYIAAEEEDWDYAPLVLAPDDRSYKSQYLNNGPQRIGRKYKKVRFMAY |
| AG864 | TDETFKTREAIQHESGILGPLLYGEVGDTLLIIFKNQASRPYNIYPHGITDVRPLYSRRLPKGVK |
| | HLKDFPILPGEIFKYKWTVTVEDGPTKSDPRCLTRYYSSFVNMERDLASGLIGPLLICYKESVD |
| | QRGNQIMSDKRNVILFSVFDENRSWYLTENIQRFLPNPAGVQLEDPEFQASNIMHSINGYVFD |
| | SLQLSVCLHEVAYWYILSIGAQTDFLSVFFSGYTFKHKMVYEDTLTLFPFSGETVFMSMENPG |
| | LWILGCHNSDFRNRGMTALLKVSSCDKNTGDYYEDSYEDISAYLLSKNNAIEPRSFSQNGPG |
| | ASPGTSSTGSPGASPGTSSTGSPGTPGSGTASSSPGSSTPSGATGSPGTPGSGTASSSPGSSTPSG |
| | ATGSPGTPGSGTASSSPGSSTPSGATGSPGSSTPSGATGSPGSSPSASTGTGPGSSPSASTGTGPG |
| | ASPGTSSTGSPGTPGSGTASSSPGSSTPSGATGSPGSSPSASTGTGPGSSPSASTGTGPGASPGTS |
| | STGSPGASPGTSSTGSPGSSTPSGATGSPGSSPSASTGTGPGASPGTSSTGSPGSSPSASTGTGPG |
| | TPGSGTASSSPGSSTPSGATGSPPVLKRHQREITRTTLQSDQEEIDYDDTISVEMKKEDFDIYDE |
| | DENQSPRSFQKKTRHYFIAAVERLWDYGMSSSPHVLRNRAQSGSVPQFKKVVFQEFTDGSFT |
| | QPLYRGELNEHLGLLGPYIRAEVEDNIMVTFRNQASRPYSFYSSLISYEEDQRQGAEPRKNFV |
| | KPNETKTYFWKVQHHMAPTKDEFDCKAWAYFSDVDLEKDVHSGLIGPLLVCHTNTLNPAH |
| | GRQVTVQEFALFFTIFDETKSWYFTENMERNCRAPCNIQMEDPTFKENYRFHAINGYIMDTLP |
| | GLVMAQDQRIRWYLLSMGSNENIHSIHFSGHVFTVRKKEEYKMALYNLYPGVFETVEMLPS |
| | KAGIWRVECLIGEHLHAGMSTLFLVYSNKCQTPLGMASGHIRDFQITASGQYGQWAPKLARL |
| | HYSGSINAWSTKEPFSWIKVDLLAPMIIHGIKTQGARQKFSSLYISQFIIMYSLDGKKWQTYRG |
| | NSTGTLMVFFGNVDSSGIKHNIFNPPIIARYIRLHPTHYSIRSTLRMELMGCDLNSCSMPLGME |
| | SKAISDAQITASSYFTNMFATWSPSKARLHLQGRSNAWRPQVNNPKEWLQVDFQKTMKVTG |
| | VTTQGVKSLLTSMYVKEFLISSSQDGHQWTLFFQNGKVKVFQGNQDSFTPVVNSLDPPLLTR |
| | YLRIHPQSWVHQIALRMEVLGCEAQDLYKLTRAETGGASPGTSSTGSPGSSPSASTGTGPGSS |
| | PSASTGTGPGTPGSGTASSSPGSSTPSGATGSPGSSPSASTGTGPGASPGTSSTGSPGTPGSGTAS |
| | SSPGSSTPSGATGSPGTPGSGTASSSPGASPGTSSTGSPGASPGTSSTGSPGTPGSGTASSSPGSS |
| | TPSGATGSPGASPGTSSTGSPGTPGSGTASSSPGSSTPSGATGSPGSSPSASTGTGPGSSPSASTG |
| | TGPGSSTPSGATGSPGSSTPSGATGSPGASPGTSSTGSPGASPGTSSTGSPGASPGTSSTGSPGTP |
| | GSGTASSSPGASPGTSSTGSPGASPGTSSTGSPGASPGTSSTGSPGSSPSASTGTGPGTPGSGTAS |
| | SSPGASPGTSSTGSPGASPGTSSTGSPGASPGTSSTGSPGSSTPSGATGSPGSSTPSGATGSPGAS |
| | PGTSSTGSPGTPGSGTASSSPGSSTPSGATGSPGSSTPSGATGSPGSSTPSGATGSPGSSPSASTG |
| | TGPGASPGTSSTGSPGASPGTSSTGSPGTPGSGTASSSPGASPGTSSTGSPGASPGTSSTGSPGAS |
| | PGTSSTGSPGASPGTSSTGSPGTPGSGTASSSPGSSTPSGATGSPGTPGSGTASSSPGSSTPSGAT |
| | GSPGTPGSGTASSSPGSSTPSGATGSPGSSTPSGATGSPGSSPSASTGTGPGSSPSASTGTGPGAS |
| | PGTSSTGSPGTPGSGTASSSPGSSTPSGATGSPGSSPSASTGTGPGSSPSASTGTGPGASPGTSST |
| | GSPGASPGTSSTGSPGSSTPSGATGSPGSSPSASTGTGPGASPGTSSTGSPGSSPSASTGTGPGTP |
| | GSGTASSSPGSSTPSGATGSPGSSTPSGATGSPGASPGTSSTGSP |
| FVIII | ATRRYYLGAVELSWDYMQSDLGELPVDARFPPRVPKSFPFNTSVVYKKTLFVEFTDHLFNIA |
| BDD9 (1- | KPRPPWMGLLGPTIQAEVYDTVVITLKNMASHPVSLHAVGVSYWKASEGAEYDDQTSQREK |
| 743) | EDDKVFPGGSHTYVWQVLKENGPMASDPLCLTYSYLSHVDLVKDLNSGLIGALLVCREGSL |
| AG288_2- | AKEKTQTLHKFILLFAVFDEGKSWHSETKNSLMQDRDAASARAWPKMHTVNGYVNRSLPGL |
| (1638- | IGCHRKSVYWHVIGMGTTPEVHSIFLEGHTFLVRNHRQASLEISPITFLTAQTLLMDLGQFLLF |
| Y2332)- | CHISSHQHDGMEAYVKVDSCPEEPQLRMKNNEEAEDYDDDLTDSEMDVVRFDDDNSPSFIQI |
| FXIa- | RSVAKKHPKTWVHYIAAEEEDWDYAPLVLAPDDRSYKSQYLNNGPQRIGRKYKKVRFMAY |
| AG864 | TDETFKTREAIQHESGILGPLLYGEVGDTLLIIFKNQASRPYNIYPHGITDVRPLYSRRLPKGVK |
| | HLKDFPILPGEIFKYKWTVTVEDGPTKSDPRCLTRYYSSFVNMERDLASGLIGPLLICYKESVD |
| | QRGNQIMSDKRNVILFSVFDENRSWYLTENIQRFLPNPAGVQLEDPEFQASNIMHSINGYVFD |
| | SLQLSVCLHEVAYWYILSIGAQTDFLSVFFSGYTFKHKMVYEDTLTLFPFSGETVFMSMENPG |
| | LWILGCHNSDFRNRGMTALLKVSSCDKNTGDYYEDSYEDISAYLLSKNNAIEPRSFSGPGASP |
| | GTSSTGSPGASPGTSSTGSPGTPGSGTASSSPGSSTPSGATGSPGTPGSGTASSSPGSSTPSGATG |
| | SPGTPGSGTASSSPGSSTPSGATGSPGSSTPSGATGSPGSSPSASTGTGPGSSPSASTGTGPGASP |
| | GTSSTGSPGTPGSGTASSSPGSSTPSGATGSPGSSPSASTGTGPGSSPSASTGTGPGASPGTSSTG |
| | SPGASPGTSSTGSPGSSTPSGATGSPGSSPSASTGTGPGASPGTSSTGSPGSSPSASTGTGPGTPG |
| | SGTASSSPGSSTPSGATGSQNPPVLKRHQREITRTTLQSDQEEIDYDDTISVEMKKEDFDIYDE |
| | DENQSPRSFQKKTRHYFIAAVERLWDYGMSSSPHVLRNRAQSGSVPQFKKVVFQEFTDGSFT |
| | QPLYRGELNEHLGLLGPYIRAEVEDNIMVTFRNQASRPYSFYSSLISYEEDQRQGAEPRKNFV |
| | KPNETKTYFWKVQHHMAPTKDEFDCKAWAYFSDVDLEKDVHSGLIGPLLVCHTNTLNPAH |
| | GRQVTVQEFALFFTIFDETKSWYFTENMERNCRAPCNIQMEDPTFKENYRFHAINGYIMDTLP |
| | GLVMAQDQRIRWYLLSMGSNENIHSIHFSGHVFTVRKKEEYKMALYNLYPGVFETVEMLPS |
| | KAGIWRVECLIGEHLHAGMSTLFLVYSNKCQTPLGMASGHIRDFQITASGQYGQWAPKLARL |
| | HYSGSINAWSTKEPFSWIKVDLLAPMIIHGIKTQGARQKFSSLYISQFIIMYSLDGKKWQTYRG |
| | NSTGTLMVFFGNVDSSGIKHNIFNPPIIARYIRLHPTHYSIRSTLRMELMGCDLNSCSMPLGME |
| | SKAISDAQITASSYFTNMFATWSPSKARLHLQGRSNAWRPQVNNPKEWLQVDFQKTMKVTG |
| | VTTQGVKSLLTSMYVKEFLISSSQDGHQWTLFFQNGKVKVFQGNQDSFTPVVNSLDPPLLTR |
| | YLRIHPQSWVHQIALRMEVLGCEAQDLYKLTRAETGGASPGTSSTGSPGSSPSASTGTGPGSS |
| | PSASTGTGPGTPGSGTASSSPGSSTPSGATGSPGSSPSASTGTGPGASPGTSSTGSPGTPGSGTAS |
| | SSPGSSTPSGATGSPGTPGSGTASSSPGASPGTSSTGSPGASPGTSSTGSPGTPGSGTASSSPGSS |
| | TPSGATGSPGASPGTSSTGSPGTPGSGTASSSPGSSTPSGATGSPGSSPSASTGTGPGSSPSASTG |
| | TGPGSSTPSGATGSPGSSTPSGATGSPGASPGTSSTGSPGASPGTSSTGSPGASPGTSSTGSPGTP |
| | GSGTASSSPGASPGTSSTGSPGASPGTSSTGSPGASPGTSSTGSPGSSPSASTGTGPGTPGSGTAS |
| | SSPGASPGTSSTGSPGASPGTSSTGSPGASPGTSSTGSPGSSTPSGATGSPGSSTPSGATGSPGAS |
| | PGTSSTGSPGTPGSGTASSSPGSSTPSGATGSPGSSTPSGATGSPGSSTPSGATGSPGSSPSASTG |
| | TGPGASPGTSSTGSPGASPGTSSTGSPGTPGSGTASSSPGASPGTSSTGSPGASPGTSSTGSPGAS |
| | PGTSSTGSPGASPGTSSTGSPGTPGSGTASSSPGSSTPSGATGSPGTPGSGTASSSPGSSTPSGAT |
| | GSPGTPGSGTASSSPGSSTPSGATGSPGSSTPSGATGSPGSSPSASTGTGPGSSPSASTGTGPGAS |
| | PGTSSTGSPGTPGSGTASSSPGSSTPSGATGSPGSSPSASTGTGPGSSPSASTGTGPGASPGTSST |
| | GSPGASPGTSSTGSPGSSTPSGATGSPGSSPSASTGTGPGASPGTSSTGSPGSSPSASTGTGPGTP |
| | GSGTASSSPGSSTPSGATGSPGSSTPSGATGSPGASPGTSSTGSP |
| BDD10 (1- | ATRRYYLGAVELSWDYMQSDLGELPVDARFPPRVPKSFPFNTSVVYKKTLFVEFTDHLFNIA |
| 745) | KPRPPWMGLLGPTIQAEVYDTVVITLKNMASHPVSLHAVGVSYWKASEGAEYDDQTSQREK |
| AG288_2- | EDDKVFPGGSHTYVWQVLKENGPMASDPLCLTYSYLSHVDLVKDLNSGLIGALLVCREGSL |
| (1640- | AKEKTQTLHKFILLFAVFDEGKSWHSETKNSLMQDRDAASARAWPKMHTVNGYVNRSLPGL |
| Y2332)- | IGCHRKSVYWHVIGMGTTPEVHSIFLEGHTFLVRNHRQASLEISPITFLTAQTLLMDLGQFLLF |
| FXIa- | CHISSHQHDGMEAYVKVDSCPEEPQLRMKNNEEAEDYDDDLTDSEMDVVRFDDDNSPSFIQI |
| AG864 | RSVAKKHPKTWVHYIAALEEDWDYAPLVLAPDDRSYKSQYLNNGPQRIGRKYKKVRFMAY |
| | TDETFKTREAIQHESGILGPLLYGEVGDTLLIIFKNQASRPYNIYPHGITDVRPLYSRRLPKGVK |
| | HLKDFPILPGEIFKYKWTVTVEDGPTKSDPRCLTRYYSSFVNMERDLASGLIGPLLICYKESVD |
| | QRGNQIMSDKRNVILFSVFDENRSWYLTENIQRFLPNPAGVQLEDPEFQASNIMHSINGYVFD |
| | SLQLSVCLHEVAYWYILSIGAQTDFLSVFFSGYTFKHKMVYEDTLTLFPFSGETVFMSMENPG |
| | LWILGCHNSDFRNRGMTALLKVSSCDKNTGDYYEDSYEDISAYLLSKNNAIEPRSFSQNGPG |
| | ASPGTSSTGSPGASPGTSSTGSPGTPGSGTASSSPGSSTPSGATGSPGTPGSGTASSSPGSSTPSG |
| | ATGSPGTPGSGTASSSPGSSTPSGATGSPGSSTPSGATGSPGSSPSASTGTGPGSSPSASTGTGPG |
| | ASPGTSSTGSPGTPGSGTASSSPGSSTPSGATGSPGSSPSASTGTGPGSSPSASTGTGPGASPGTS |
| | STGSPGASPGTSSTGSPGSSTPSGATGSPGSSPSASTGTGPGASPGTSSTGSPGSSPSASTGTGPG |
| | TPGSGTASSSPGSSTPSGATGSPPVLKRHQAEITRTTLQSDQEEIDYDDTISVEMKKEDFDIYDE |
| | DENQSPRSFQKKTRHYFIAAVERLWDYGMSSSPHVLRNRAQSGSVPQFKKVVFQEFTDGSFT |
| | QPLYRGELNEHLGLLGPYIRAEVEDNIMVTFRNQASRPYSFYSSLISYEEDQRQGAEPRKNFV |
| | KPNETKTYFWKVQHHMAPTKDEFDCKAWAYFSDVDLEKDVHSGLIGPLLVCHTNTLNPAH |
| | GRQVTVQEFALFFTIFDETKSWYFTENMERNCRAPCNIQMEDPTFKENYRFHAINGYIMDTLP |
| | GLVMAQDQRIRWYLLSMGSNENIHSIHFSGHVFTVRKKEEYKMALYNLYPGVFETVEMLPS |
| | KAGIWRVECLIGEHLHAGMSTLFLVYSNKCQTPLGMASGHIRDFQITASGQYGQWAPKLARL |
| | HYSGSINAWSTKEPFSWIKVDLLAPMIIHGIKTQGARQKFSSLYISQFIIMYSLDGKKWQTYRG |
| | NSTGTLMVFFGNVDSSGIKHNIFNPPIIARYIRLHPTHYSIRSTLRMELMGCDLNSCSMPLGME |
| | SKAISDAQITASSYFTNMFATWSPSKARLHLQGRSNAWRPQVNNPKEWLQVDFQKTMKVTG |
| | VTTQGVKSLLTSMYVKEFLISSSQDGHQWTLFFQNGKVKVFQGNQDSFTPVVNSLDPPLLTR |
| | YLRIHPQSWVHQIALRMEVLGCEAQDLYKLTRAETGGASPGTSSTGSPGSSPSASTGTGPGSS |
| | PSASTGTGPGTPGSGTASSSPGSSTPSGATGSPGSSPSASTGTGPGASPGTSSTGSPGTPGSGTAS |
| | SSPGSSTPSGATGSPGTPGSGTASSSPGASPGTSSTGSPGASPGTSSTGSPGTPGSGTASSSPGSS |
| | TPSGATGSPGASPGTSSTGSPGTPGSGTASSSPGSSTPSGATGSPGSSPSASTGTGPGSSPSASTG |
| | TGPGSSTPSGATGSPGSSTPSGATGSPGASPGTSSTGSPGASPGTSSTGSPGASPGTSSTGSPGTP |
| | GSGTASSSPGASPGTSSTGSPGASPGTSSTGSPGASPGTSSTGSPGSSPSASTGTGPGTPGSGTAS |
| | SSPGASPGTSSTGSPGASPGTSSTGSPGASPGTSSTGSPGSSTPSGATGSPGSSTPSGATGSPGAS |
| | PGTSSTGSPGTPGSGTASSSPGSSTPSGATGSPGSSTPSGATGSPGSSTPSGATGSPGSSPSASTG |
| | TGPGASPGTSSTGSPGASPGTSSTGSPGTPGSGTASSSPGASPGTSSTGSPGASPGTSSTGSPGAS |
| | PGTSSTGSPGASPGTSSTGSPGTPGSGTASSSPGSSTPSGATGSPGTPGSGTASSSPGSSTPSGAT |
| | GSPGTPGSGTASSSPGSSTPSGATGSPGSSTPSGATGSPGSSPSASTGTGPGSSPSASTGTGPGAS |
| | PGTSSTGSPGTPGSGTASSSPGSSTPSGATGSPGSSPSASTGTGPGSSPSASTGTGPGASPGTSST |
| | GSPGASPGTSSTGSPGSSTPSGATGSPGSSPSASTGTGPGASPGTSSTGSPGSSPSASTGTGPGTP |
| | GSGTASSSPGSSTPSGATGSPGSSTPSGATGSPGASPGTSSTGSP |
| FVIII | ATRRYYLGAVELSWDYMQSDLGELPVDARFPPRVPKSFPFNTSVVYKKTLFVEFTDHLFNIA |
| BDD10- | KPRPPWMGLLGPTIQAEVYDTVVITLKNMASHPVSLHAVGVSYWKASEGAEYDDQTSQREK |
| FXIa- | EDDKVFPGGSHTYVWQVLKENGPMASDPLCLTYSYLSHVDLVKDLNSGLIGALLVCREGSL |
| AG288_2 | AKEKTQTLHKFILLFAVFDEGKSWHSETKNSLMQDRDAASARAWPKMHTVNGYVNRSLPGL |
| | IGCHRKSVYWHVIGMGTTPEVHSIFLEGHTFLVRNHRQASLEISPITFLTAQTLLMDLGQFLLF |
| | CHISSHQHDGMEAYVKVDSCPEEPQLRMKNNEEAEDYDDDLTDSEMDVVRFDDDNSPSFIQI |
| | RSVAKKHPKTWVHYIAALEEDWDYAPLVLAPDDRSYKSQYLNNGPQRIGRKYKKVRFMAY |
| | TDETFKTREAIQHESGILGPLLYGEVGDTLLIIFKNQASRPYNIYPHGITDVRPLYSRRLPKGVK |
| | HLKDFPILPGEIFKYKWTVTVEDGPTKSDPRCLTRYYSSFVNMERDLASGLIGPLLICYKESVD |
| | QRGNQIMSDKRNVILFSVFDENRSWYLTENIQRFLPNPAGVQLEDPEFQASNIMHSINGYVFD |
| | SLQLSVCLHEVAYWYILSIGAQTDFLSVFFSGYTFKHKMVYEDTLTLFPFSGETVFMSMENPG |
| | LWILGCHNSDFRNRGMTALLKVSSCDKNTGDYYEDSYEDISAYLLSKNNAIEPRSFSQNPPVL |
| | KRHQAEITRTTLQSDQEEIDYDDTISVEMKKEDFDIYDEDENQSPRSFQKKTRHYFIAAVERL |
| | WDYGMSSSPHVLRNRAQSGSVPQFKKVVFQEFTDGSFTQPLYRGELNEHLGLLGPYIRAEVE |
| | DNIMVTFRNQASRPYSFYSSLISYEEDQRQGAEPRKNFVKPNETKTYFWKVQHHMAPTKDEF |
| | DCKAWAYFSDVDLEKDVHSGLIGPLLVCHTNTLNPAHGRQVTVQEFALFFTIFDETKSWYFT |
| | ENMERNCRAPCNIQMEDPTFKENYRFHAINGYIMDTLPGLVMAQDQRIRWYLLSMGSNENIH |
| | SIHFSGHVFTVRKKEEYKMALYNLYPGVFETVEMLPSKAGIWRVECLIGEHLHAGMSTLFLV |
| | YSNKCQTPLGMASGHIRDFQITASGQYGQWAPKLARLHYSGSINAWSTKEPFSWIKVDLLAP |
| | MIIHGIKTQGARQKFSSLYISQFIIMYSLDGKKWQTYRGNSTGTLMVFFGNVDSSGIKHNIFNP |
| | PIIARYIRLHPTHYSIRSTLRMELMGCDLNSCSMPLGMESKAISDAQITASSYFTNMFATWSPS |
| | KARLHLQGRSNAWRPQVNNPKEWLQVDFQKTMKVTGVTTQGVKSLLTSMYVKEFLISSSQD |
| | GHQWTLFFQNGKVKVFQGNQDSFTPVVNSLDPPLLTRYLRIHPQSWVHQIALRMEVLGCEA |
| | QDLYKLTRAETGAGSPGAETAPGASPGTSSTGSPGASPGTSSTGSPGTPGSGTASSSPGSSTPSG |
| | ATGSPGTPGSGTASSSPGSSTPSGATGSPGTPGSGTASSSPGSSTPSGATGSPGSSTPSGATGSPG |
| | SSPSASTGTGPGSSPSASTGTGPGASPGTSSTGSPGTPGSGTASSSPGSSTPSGATGSPGSSPSAS |
| | TGTGPGSSPSASTGTGPGASPGTSSTGSPGASPGTSSTGSPGSSTPSGATGSPGSSPSASTGTGPG |
| | ASPGTSSTGSPGSSPSASTGTGPGTPGSGTASSSPGSSTPSGATGSGAETAEQKLISEEDLSPATG |
| FVIII | ATRRYYLGAVELSWDYMQSDLGELPVDARFPPRVPKSFPFNTSVVYKKTLFVEFTDHLFNIA |
| BDD10- | KPRPPWMGLLGPTIQAEVYDTVVITLKNMASHPVSLHAVGVSYWKASEGAEYDDQTSQREK |
| FXIa- | EDDKVFPGGSHTYVWQVLKENGPMASDPLCLTYSYLSHVDLVKDLNSGLIGALLVCREGSL |
| AG864 | AKEKTQTLHKFILLFAVFDEGKSWHSETKNSLMQDRDAASARAWPKMHTVNGYVNRSLPGL |
| | IGCHRKSVYWHVIGMGTTPEVHSIFLEGHTFLVRNHRQASLEISPITFLTAQTLLMDLGQFLLF |
| | CHISSHQHDGMEAYVKVDSCPEEPQLRMKNNEEAEDYDDDLTDSEMDVVRFDDDNSPSFIQI |
| | RSVAKKHPKTWVHYIAAEEEDWDYAPLVLAPDDRSYKSQYLNNGPQRIGRKYKKVRFMAY |
| | TDETFKTREAIQHESGILGPLLYGEVGDTLLIIFKNQASRPYNIYPHGITDVRPLYSRRLPKGVK |
| | HLKDFPILPGEIFKYKWTVTVEDGPTKSDPRCLTRYYSSFVNMERDLASGLIGPLLICYKESVD |
| | QRGNQIMSDKRNVILFSVFDENRSWYLTENIQRFLPNPAGVQLEDPEFQASNIMHSINGYVFD |
| | SLQLSVCLHEVAYWYILSIGAQTDFLSVFFSGYTFKHKMVYEDTLTLFPFSGETVFMSMENPG |
| | LWILGCHNSDFRNRGMTALLKVSSCDKNTGDYYEDSYEDISAYLLSKNNAIEPRSFSQNPPVL |
| | KRHQAEITRTTLQSDQEEIDYDDTISVEMKKEDFDIYDEDENQSPRSFQKKTRHYFIAAVERL |
| | WDYGMSSSPHVLRNRAQSGSVPQFKKVVFQEFTDGSFTQPLYRGELNEHLGLLGPYIRAEVE |
| | DNIMVTFRNQASRPYSFYSSLISYEEDQRQGAEPRKNFVKPNETKTYFWKVQHHMAPTKDEF |
| | DCKAWAYFSDVDLEKDVHSGLIGPLLVCHTNTLNPAHGRQVTVQEFALFFTIFDETKSWYFT |
| | ENMERNCRAPCNIQMEDPTFKENYRFHAINGYIMDTLPGLVMAQDQRIRWYLLSMGSNENIH |
| | SIHFSGHVFTVRKKEEYKMALYNLYPGVFETVEMLPSKAGIWRVECLIGEHLHAGMSTLFLV |
| | YSNKCQTPLGMASGHIRDFQITASGQYGQWAPKLARLHYSGSINAWSTKEPFSWIKVDLLAP |
| | MIIHGIKTQGARQKFSSLYISQFIIMYSLDGKKWQTYRGNSTGTLMVFFGNVDSSGIKHNIFNP |
| | PIIARYIRLHPTHYSIRSTLRMELMGCDLNSCSMPLGMESKAISDAQITASSYFTNMFATWSPS |
| | KARLHLQGRSNAWRPQVNNPKEWLQVDFQKTMKVTGVTTQGVKSLLTSMYVKEFLISSSQD |
| | GHQWTLFFQNGKVKVFQGNQDSFTPVVNSLDPPLLTRYLRIHPQSWVHQIALRMEVLGCEA |
| | QDLYKLTRAETGGASPGTSSTGSPGSSPSASTGTGPGSSPSASTGTGPGTPGSGTASSSPGSSTP |
| | SGATGSPGSSPSASTGTGPGASPGTSSTGSPGTPGSGTASSSPGSSTPSGATGSPGTPGSGTASSS |
| | PGASPGTSSTGSPGASPGTSSTGSPGTPGSGTASSSPGSSTPSGATGSPGASPGTSSTGSPGTPGS |
| | GTASSSPGSSTPSGATGSPGSSPSASTGTGPGSSPSASTGTGPGSSTPSGATGSPGSSTPSGATGS |
| | PGASPGTSSTGSPGASPGTSSTGSPGASPGTSSTGSPGTPGSGTASSSPGASPGTSSTGSPGASPG |
| | TSSTGSPGASPGTSSTGSPGSSPSASTGTGPGTPGSGTASSSPGASPGTSSTGSPGASPGTSSTGS |
| | PGASPGTSSTGSPGSSTPSGATGSPGSSTPSGATGSPGASPGTSSTGSPGTPGSGTASSSPGSSTP |
| | SGATGSPGSSTPSGATGSPGSSTPSGATGSPGSSPSASTGTGPGASPGTSSTGSPGASPGTSSTGS |
| | PGTPGSGTASSSPGASPGTSSTGSPGASPGTSSTGSPGASPGTSSTGSPGASPGTSSTGSPGTPGS |
| | GTASSSPGSSTPSGATGSPGTPGSGTASSSPGSSTPSGATGSPGTPGSGTASSSPGSSTPSGATGS |
| | PGSSTPSGATGSPGSSPSASTGTGPGSSPSASTGTGPGASPGTSSTGSPGTPGSGTASSSPGSSTP |
| | SGATGSPGSSPSASTGTGPGSSPSASTGTGPGASPGTSSTGSPGASPGTSSTGSPGSSTPSGATGS |
| | PGSSPSASTGTGPGASPGTSSTGSPGSSPSASTGTGPGTPGSGTASSSPGSSTPSGATGSPGSSTP |
| | SGATGSPGASPGTSSTGSP |
| FVIII | ATRRYYLGAVELSWDYMQSDLGELPVDARFPPRVPKSFPFNTSVVYKKTLFVEFTDHLFNIA |
| BDD10- | KPRPPWMGLLGPTIQAEVYDTVVITLKNMASHPVSLHAVGVSYWKASEGAEYDDQTSQREK |
| FXIa- | EDDKVFPGGSHTYVWQVLKENGPMASDPLCLTYSYLSHVDLVKDLNSGLIGALLVCREGSL |
| AE864 | AKEKTQTLHKFILLFAVFDEGKSWHSETKNSLMQDRDAASARAWPKMHTVNGYVNRSLPGL |
| | IGCHRKSVYWHVIGMGTTPEVHSIFLEGHTFLVRNHRQASLEISPITFLTAQTLLMDLGQFLLF |
| | CHISSHQHDGMEAYVKVDSCPEEPQLRMKNNEEAEDYDDDLTDSEMDVVRFDDDNSPSFIQI |
| | RSVAKKHPKTWVHYIAAEEEDWDYAPLVLAPDDRSYKSQYLNNGPQRIGRKYKKVRFMAY |
| | TDETFKTREAIQHESGILGPLLYGEVGDTLLIIFKNQASRPYNIYPHGITDVRPLYSRRLPKGVK |
| | HLKDFPILPGEIFKYKWTVTVEDGPTKSDPRCLTRYYSSFVNMERDLASGLIGPLLICYKESVD |
| | QRGNQIMSDKRNVILFSVFDENRSWYLTENIQRFLPNPAGVQLEDPEFQASNIMHSINGYVFD |
| | SLQLSVCLHEVAYWYILSIGAQTDFLSVFFSGYTFKHKMVYEDTLTLFPFSGETVFMSMENPG |
| | LWILGCHNSDFRNRGMTALLKVSSCDKNTGDYYEDSYEDISAYLLSKNNAIEPRSFSQNPPVL |
| | KRHQAEITRTTLQSDQEEIDYDDTISVEMKKEDFDIYDEDENQSPRSFQKKTRHYFIAAVERL |
| | WDYGMSSSPHVLRNRAQSGSVPQFKKVVFQEFTDGSFTQPLYRGELNEHLGLLGPYIRAEVE |
| | DNIMVTFRNQASRPYSFYSSLISYEEDQRQGAEPRKNFVKPNETKTYFWKVQHHMAPTKDEF |
| | DCKAWAYFSDVDLEKDVHSGLIGPLLVCHTNTLNPAHGRQVTVQEFALFFTIFDETKSWYFT |
| | ENMERNCRAPCNIQMEDPTFKENYRFHAINGYIMDTLPGLVMAQDQRIRWYLLSMGSNENIH |
| | SIHFSGHVFTVRKKEEYKMALYNLYPGVFETVEMLPSKAGIWRVECLIGEHLHAGMSTLFLV |
| | YSNKCQTPLGMASGHIRDFQITASGQYGQWAPKLARLHYSGSINAWSTKEPFSWIKVDLLAP |
| | MIIHGIKTQGARQKFSSLYISQFIIMYSLDGKKWQTYRGNSTGTLMVFFGNVDSSGIKHNIFNP |
| | PIIARYIRLHPTHYSIRSTLRMELMGCDLNSCSMPLGMESKAISDAQITASSYFTNMFATWSPS |
| | KARLHLQGRSNAWRPQVNNPKEWLQVDFQKTMKVTGVTTQGVKSLLTSMYVKEFLISSSQD |
| | GHQWTLFFQNGKVKVFQGNQDSFTPVVNSLDPPLLTRYLRIHPQSWVHQIALRMEVLGCEA |
| | QDLYKLTRAETGGSPAGSPTSTEEGTSESATPESGPGTSTEPSEGSAPGSPAGSPTSTEEGTSTE |
| | PSEGSAPGTSTEPSEGSAPGTSESATPESGPGSEPATSGSETPGSEPATSGSETPGSPAGSPTSTE |
| | EGTSESATPESGPGTSTEPSEGSAPGTSTEPSEGSAPGSPAGSPTSTEEGTSTEPSEGSAPGTSTE |
| | PSEGSAPGTSESATPESGPGTSTEPSEGSAPGTSESATPESGPGSEPATSGSETPGTSTEPSEGSA |
| | PGTSTEPSEGSAPGTSESATPESGPGTSESATPESGPGSPAGSPTSTEEGTSESATPESGPGSEPA |
| | TSGSETPGTSESATPESGPGTSTEPSEGSAPGTSTEPSEGSAPGTSTEPSEGSAPGTSTEPSEGSAP |
| | GTSTEPSEGSAPGTSTEPSEGSAPGSPAGSPTSTEEGTSTEPSEGSAPGTSESATPESGPGSEPAT |
| | SGSETPGTSESATPESGPGSEPATSGSETPGTSESATPESGPGTSTEPSEGSAPGTSESATPESGP |
| | GSPAGSPTSTEEGSPAGSPTSTEEGSPAGSPTSTEEGTSESATPESGPGTSTEPSEGSAPGTSESA |
| | TPESGPGSEPATSGSETPGTSESATPESGPGSEPATSGSETPGTSESATPESGPGTSTEPSEGSAP |
| | GSPAGSPTSTEEGTSESATPESGPGSEPATSGSETPGTSESATPESGPGSPAGSPTSTEEGSPAGS |
| | PTSTEEGTSTEPSEGSAPGTSESATPESGPGTSESATPESGPGTSESATPESGPGSEPATSGSETP |
| | GSEPATSGSETPGSPAGSPTSTEEGTSTEPSEGSAPGTSTEPSEGSAPGSEPATSGSETPGTSESA |
| | TPESGPGTSTEPSEGSAP |

*Sequence name reflects N- to C-terminus configuration of the FVIII variant and XTEN components: signal peptide (SP); linker (L); cleavage sequence (CS) may be denoted by protease name active on the sequence, and XTEN components by family name and length, with insertion points for components denoted by FVIII amino acid and numbered positions adjacent to the inserted sequence or A1 being the N-terminus and Y2332 being the C-terminus of the FVIII.

TABLE 31
FVIII amino acid sequences

| | |
|---|---|
| Name (source) | Amino Acid Sequence |

| | |
|---|---|
| FVIII BDD-10 | ATRRYYLGAVELSWDYMQSDLGELPVDARFPPRVPKSFPFNTSVVYKKTLFVEFTDHLF |
| | NIAKPRPPWMGLLGPTIQAEVYDTVVITLKNMASHPVSLHAVGVSYWKASEGAEYDDQ |
| | TSQREKEDDKVFPGGSHTYVWQVLKENGPMASDPLCLTYSYLSHVDLVKDLNSGLIGA |
| | LLVCREGSLAKEKTQTLHKFILLFAVFDEGKSWHSETKNSLMQDRDAASARAWPKMHT |
| | VNGYVNRSLPGLIGCHRKSVYWHVIGMGTTPEVHSIFLEGHTFLVRNHRQASLEISPITFL |
| | TAQTLLMDLGQFLLFCHISSHQHDGMEAYVKVDSCPEEPQLRMKNNEEAEDYDDDLTD |
| | SEMDVVRFDDDNSPSFIQIRSVAKKHPKTWVHYIAALEEDWDYAPLVLAPDDRSYKSQ |
| | YLNNGPQRIGRKYKKVRFMAYTDETFKTREAIQHESGILGPLLYGEVGDTLLIIFKNQAS |
| | RPYNIYPHGITDVRPLYSRRLPKGVKHLKDFPILPGEIFKYKWTVTVEDGPTKSDPRCLT |
| | RYYSSFVNMERDLASGLIGPLLICYKESVDQRGNQIMSDKRNVILFSVFDENRSWYLTEN |
| | IQRFLPNPAGVQLEDPEFQASNIMHSINGYVFDSLQLSVCLHEVAYWYILSIGAQTDFLS |
| | VFFSGYTFKHKMVYEDTLTLFPFSGETVFMSMENPGLWILGCHNSDFRNRGMTALLKV |
| | SSCDKNTGDYYEDSYEDISAYLLSKNNAIEPRSFSQNPPVLKRHQAEITRTTLQSDQEEID |
| | YDDTISVEMKKEDFDIYDEDENQSPRSFQKKTRHYFIAAVERLWDYGMSSSPHVLRNRA |
| | QSGSVPQFKKVVFQEFTDGSFTQPLYRGELNEHLGLLGPYIRAEVEDNIMVTFRNQASRP |
| | YSFYSSLISYEEDQRQGAEPRKNFVKPNETKTYFWKVQHHMAPTKDEFDCKAWAYFSD |
| | VDLEKDVHSGLIGPLLVCHTNTLNPAHGRQVTVQEFALFFTIFDETKSWYFTENMERNC |
| | RAPCNIQMEDPTFKENYRFHAINGYIMDTLPGLVMAQDQRIRWYLLSMGSNENIHSIHFS |
| | GHVFTVRKKEEYKMALYNLYPGVFETVEMLPSKAGIWRVECLIGEHLHAGMSTLFLVY |
| | SNKCQTPLGMASGHIRDFQITASGQYGQWAPKLARLHYSGSINAWSTKEPFSWIKVDLL |
| | APMIIHGIKTQGARQKFSSLYISQFIIMYSLDGKKWQTYRGNSTGTLMVFFGNVDSSGIK |
| | HNIFNPPIIARYIRLHPTHYSIRSTLRMELMGCDLNSCSMPLGMESKAISDAQITASSYFTN |
| | MFATWSPSKARLHLQGRSNAWRPQVNNPKEWLQVDFQKTMKVTGVTTQGVKSLLTS |
| | MYVKEFLISSSQDGHQWTLFFQNGKVKVFQGNQDSFTPVVNSLDPPLLTRYLRIHPQSW |
| | VHQIALRMEVLGCEAQDLY |
| FVIII BDD-11 | ATRATRRYYLGAVELSWDYMQSDLGELPVDARFPPRVPKSFPFNTSVVYKKTLFVEFTD |
| | HLFNIAKPRPPWMGLLGPTIQAEVYDTVVITLKNMASHPVSLHAVGVSYWKASEGAEY |
| | DDQTSQREKEDDKVFPGGSHTYVWQVLKENGPMASDPLCLTYSYLSHVDLVKDLNSG |
| | LIGALLVCREGSLAKEKTQTLHKFILLFAVFDEGKSWHSETKNSLMQDRDAASARAWP |
| | KMHTVNGYVNRSLPGLIGCHRKSVYWHVIGMGTTPEVHSIFLEGHTFLVRNHRQASLEI |
| | SPITFLTAQTLLMDLGQFLLFCHISSHQHDGMEAYVKVDSCPEEPQLRMKNNEEAEDYD |
| | DDLTDSEMDVVRFDDDNSPSFIQIRSVAKKHPKTWVHYIAALEEDWDYAPLVLAPDDR |
| | SYKSQYLNNGPQRIGRKYKKVRFMAYTDETFKTREAIQHESGILGPLLYGEVGDTLLIIF |
| | KNQASRPYNIYPHGITDVRPLYSRRLPKGVKHLKDFPILPGEIFKYKWTVTVEDGPTKSD |
| | PRCLTRYYSSFVNMERDLASGLIGPLLICYKESVDQRGNQIMSDKRNVILFSVFDENRSW |
| | YLTENIQRFLPNPAGVQLEDPEFQASNIMHSINGYVFDSLQLSVCLHEVAYWYILSIGAQ |
| | TDFLSVFFSGYTFKHKMVYEDTLTLFPFSGETVFMSMENPGLWILGCHNSDFRNRGMTA |
| | LLKVSSCDKNTGDYYEDSYEDISAYLLSKNNAIEPRSFSQNPPVLKRHQAEITRTTLQSD |
| | QEEIDYDDTISVEMKKEDFDIYDEDENQSPRSFQKKTRHYFIAAVERLWDYGMSSSPHV |
| | LRNRAQSGSVPQFKKVVFQEFTDGSFTQPLYRGELNEHLGLLGPYIRAEVEDNIMVTFR |
| | NQASRPYSFYSSLISYEEDQRQGAEPRKNFVKPNETKTYFWKVQHHMAPTKDEFDCKA |
| | WAYFSDVDLEKDVHSGLIGPLLVCHTNTLNPAHGRQVTVQEFALFFTIFDETKSWYFTE |
| | NMERNCRAPCNIQMEDPTFKENYRFHAINGYIMDTLPGLVMAQDQRIRWYLLSMGSNE |
| | NIHSIHFSGHVFTVRKKEEYKMALYNLYPGVFETVEMLPSKAGIWRVECLIGEHLHAGM |
| | STLFLVYSNKCQTPLGMASGHIRDFQITASGQYGQWAPKLARLHYSGSINAWSTKEPFS |
| | WIKVDLLAPMIIHGIKTQGARQKFSSLYISQFIIMYSLDGKKWQTYRGNSTGTLMVFFGN |
| | VDSSGIKHNIFNPPIIARYIRLHPTHYSIRSTLRMELMGCDLNSCSMPLGMESKAISDAQIT |
| | ASSYFTNMFATWSPSKARLHLQGRSNAWRPQVNNPKEWLQVDFQKTMKVTGVTTQG |
| | VKSLLTSMYVKEFLISSSQDGHQWTLFFQNGKVKVFQGNQDSFTPVVNSLDPPLLTRYL |
| | RIHPQSWVHQIALRMEVLGCEAQDLY |

The application's sequence listing, which the Patent Office published only in electronic form, follows.

SEQUENCE LISTING (961 sequences)

SEQ ID NO: 1 - protein, 14 aa, Unknown
  Description of Unknown: B-domain-deleted Factor VIII B domain remnant peptide
SFSQNPPVLKRHQR

SEQ ID NO: 2 - protein, 6 aa, Artificial Sequence
  Description of Artificial Sequence: Synthetic peptide
GPEGPS

SEQ ID NO: 3 - protein, 19 aa, Unknown
  Description of Unknown: Signal peptide
MQIELSTCFFLCLLRFCFS

SEQ ID NO: 4 - protein, 11 aa, Unknown
  Description of Unknown: B-domain-deleted Factor VIII B2 remnant peptide
QNPPVLKRHQR

SEQ ID NO: 5 - protein, 9 aa, Unknown
  Description of Unknown: B-domain-deleted Factor VIII B2 remnant peptide
PPVLKRHQR

SEQ ID NO: 6 - protein, 2351 aa, Homo sapiens
MQIELSTCFFLCLLRFCFSATRRYYLGAVELSWDYMQSDLGELPVDARFPPRVPKSFPFNTSVVYKKTLFVEFTDHLFNIAKPRPPWMGLLGPTIQAEVYDTVVITLKNMASHPVSLHAVGVSYWKASEGAEYDDQTSQREKEDDKVFPGGSHTYVWQVLKENGPMASDPLCLTYSYLSHVDLVKDLNSGLIGALLVCREGSLAKEKTQTLHKFILLFAVFDEGKSWHSETKNSLMQDRDAASARAWPKMHTVNGYVNRSLPGLIGCHRKSVYWHVIGMGTTPEVHSIFLEGHTFLVRNHRQASLEISPITFLTAQTLLMDLGQFLLFCHISSHQHDGMEAYVKVDSCPEEPQLRMKNNEEAEDYDDDLTDSEMDVVRFDDDNSPSFIQIRSVAKKHPKTWVHYIAAEEEDWDYAPLVLAPDDRSYKSQYLNNGPQRIGRKYKKVRFMAYTDETFKTREAIQHESGILGPLLYGEVGDTLLIIFKNQASRPYNIYPHGITDVRPLYSRRLPKGVKHLKDFPILPGEIFKYKWTVTVEDGPTKSDPRCLTRYYSSFVNMERDLASGLIGPLLICYKESVDQRGNQIMSDKRNVILFSVFDENRSWYLTENIQRFLPNPAGVQLEDPEFQASNIMHSINGYVFDSLQLSVCLHEVAYWYILSIGAQTDFLSVFFSGYTFKHKMVYEDTLTLFPFSGETVFMSMENPGLWILGCHNSDFRNRGMTALLKVSSCDKNTGDYYEDSYEDISAYLLSKNNAIEPRSFSQNSRHPSTRQKQFNATTIPENDIEKTDPWFAHRTPMPKIQNVSSSDLLMLLRQSPTPHGLSLSDLQEAKYETFSDDPSPGAIDSNNSLSEMTHFRPQLHHSGDMVFTPESGLQLRLNEKLGTTAATELKKLDFKVSSTSNNLISTIPSDNLAAGTDNTSSLGPPSMPVHYDSQLDTTLFGKKSSPLTESGGPLSLSEENNDSKLLESGLMNSQESSWGKNVSSTESGRLFKGKRAHGPALLTKDNALFKVSISLLKTNKTSNNSATNRKTHIDGPSLLIENSPSVWQNILESDTEFKKVTPLIHDRMLMDKNATALRLNHMSNKTTSSKNMEMVQQKKEGPIPPDAQNPDMSFFKMLFLPESARWIQRTHGKNSLNSGQGPSPKQLVSLGPEKSVEGQNFLSEKNKVVVGKGEFTKDVGLKEMVFPSSRNLFLTNLDNLHENNTHNQEKKIQEEIEKKETLIQENVVLPQIHTVTGTKNFMKNLFLLSTRQNVEGSYDGAYAPVLQDFRSLNDSTNRTKKHTAHFSKKGEEENLEGLGNQTKQIVEKYACTTRISPNTSQQNFVTQRSKRALKQFRLPLEETELEKRIIVDDTSTQWSKNMKHLTPSTLTQIDYNEKEKGAITQSPLSDCLTRSHSIPQANRSPLPIAKVSSFPSIRPIYLTRVLFQDNSSHLPAASYRKKDSGVQESSHFLQGAKKNNLSLAILTLEMTGDQREVGSLGTSATNSVTYKKVENTVLPKPDLPKTSGKVELLPKVHIYQKDLFPTETSNGSPGHLDLVEGSLLQGTEGAIKWNEANRPGKVPFLRVATESSAKTPSKLLDPLAWDNHYGTQIPKEEWKSQEKSPEKTAFKKKDTILSLNACESNHAIAAINEGQNKPEIEVTWAKQGRTERLCSQNPPVLKRHQREITRTTLQSDQEEIDYDDTISVEMKKEDFDIYDEDENQSPRSFQKKTRHYFIAAVERLWDYGMSSSPHVLRNRAQSGSVPQFKKVVFQEFTDGSFTQPLYRGELNEHLGLLGPYIRAEVEDNIMVTFRNQASRPYSFYSSLISYEEDQRQGAEPRKNFVKPNETKTYFWKVQHHMAPTKDEFDCKAWAYFSDVDLEKDVHSGLIGPLLVCHTNTLNPAHGRQVTVQEFALFFTIFDETKSWYFTENMERNCRAPCNIQMEDPTFKENYRFHAINGYIMDTLPGLVMAQDQRIRWYLLSMGSNENIHSIHFSGHVFTVRKKEEYKMALYNLYPGVFETVEMLPSKAGIWRVECLIGEHLHAGMSTLFLVYSNKCQTPLGMASGHIRDFQITASGQYGQWAPKLARLHYSGSINAWSTKEPFSWIKVDLLAPMIIHGIKTQGARQKFSSLYISQFIIMYSLDGKKWQTYRGNSTGTLMVFFGNVDSSGIKHNIFNPPIIARYIRLHPTHYSIRSTLRMELMGCDLNSCSMPLGMESKAISDAQITASSYFTNMFATWSPSKARLHLQGRSNAWRPQVNNPKEWLQVDFQKTMKVTGVTTQGVKSLLTSMYVKEFLISSSQDGHQWTLFFQNGKVKVFQGNQDSFTPVVNSLDPPLLTRYLRIHPQSWVHQIALRMEVLGCEAQDLY

SEQ ID NO: 7 - protein, 2332 aa, Homo sapiens
ATRRYYLGAVELSWDYMQSDLGELPVDARFPPRVPKSFPFNTSVVYKKTLFVEFTDHLFNIAKPRPPWMGLLGPTIQAEVYDTVVITLKNMASHPVSLHAVGVSYWKASEGAEYDDQTSQREKEDDKVFPGGSHTYVWQVLKENGPMASDPLCLTYSYLSHVDLVKDLNSGLIGALLVCREGSLAKEKTQTLHKFILLFAVFDEGKSWHSETKNSLMQDRDAASARAWPKMHTVNGYVNRSLPGLIGCHRKSVYWHVIGMGTTPEVHSIFLEGHTFLVRNHRQASLEISPITFLTAQTLLMDLGQFLLFCHISSHQHDGMEAYVKVDSCPEEPQLRMKNNEEAEDYDDDLTDSEMDVVRFDDDNSPSFIQIRSVAKKHPKTWVHYIAAEEEDWDYAPLVLAPDDRSYKSQYLNNGPQRIGRKYKKVRFMAYTDETFKTREAIQHESGILGPLLYGEVGDTLLIIFKNQASRPYNIYPHGITDVRPLYSRRLPKGVKHLKDFPILPGEIFKYKWTVTVEDGPTKSDPRCLTRYYSSFVNMERDLASGLIGPLLICYKESVDQRGNQIMSDKRNVILFSVFDENRSWYLTENIQRFLPNPAGVQLEDPEFQASNIMHSINGYVFDSLQLSVCLHEVAYWYILSIGAQTDFLSVFFSGYTFKHKMVYEDTLTLFPFSGETVFMSMENPGLWILGCHNSDFRNRGMTALLKVSSCDKNTGDYYEDSYEDISAYLLSKNNAIEPRSFSQNSRHPSTRQKQFNATTIPENDIEKTDPWFAHRTPMPKIQNVSSSDLLMLLRQSPTPHGLSLSDLQEAKYETFSDDPSPGAIDSNNSLSEMTHFRPQLHHSGDMVFTPESGLQLRLNEKLGTTAATELKKLDFKVSSTSNNLISTIPSDNLAAGTDNTSSLGPPSMPVHYDSQLDTTLFGKKSSPLTESGGPLSLSEENNDSKLLESGLMNSQESSWGKNVSSTESGRLFKGKRAHGPALLTKDNALFKVSISLLKTNKTSNNSATNRKTHIDGPSLLIENSPSVWQNILESDTEFKKVTPLIHDRMLMDKNATALRLNHMSNKTTSSKNMEMVQQKKEGPIPPDAQNPDMSFFKMLFLPESARWIQRTHGKNSLNSGQGPSPKQLVSLGPEKSVEGQNFLSEKNKVVVGKGEFTKDVGLKEMVFPSSRNLFLTNLDNLHENNTHNQEKKIQEEIEKKETLIQENVVLPQIHTVTGTKNFMKNLFLLSTRQNVEGSYDGAYAPVLQDFRSLNDSTNRTKKHTAHFSKKGEEENLEGLGNQTKQIVEKYACTTRISPNTSQQNFVTQRSKRALKQFRLPLEETELEKRIIVDDTSTQWSKNMKHLTPSTLTQIDYNEKEKGAITQSPLSDCLTRSHSIPQANRSPLPIAKVSSFPSIRPIYLTRVLFQDNSSHLPAASYRKKDSGVQESSHFLQGAKKNNLSLAILTLEMTGDQREVGSLGTSATNSVTYKKVENTVLPKPDLPKTSGKVELLPKVHIYQKDLFPTETSNGSPGHLDLVEGSLLQGTEGAIKWNEANRPGKVPFLRVATESSAKTPSKLLDPLAWDNHYGTQIPKEEWKSQEKSPEKTAFKKKDTILSLNACESNHAIAAINEGQNKPEIEVTWAKQGRTERLCSQNPPVLKRHQREITRTTLQSDQEEIDYDDTISVEMKKEDFDIYDEDENQSPRSFQKKTRHYFIAAVERLWDYGMSSSPHVLRNRAQSGSVPQFKKVVFQEFTDGSFTQPLYRGELNEHLGLLGPYIRAEVEDNIMVTFRNQASRPYSFYSSLISYEEDQRQGAEPRKNFVKPNETKTYFWKVQHHMAPTKDEFDCKAWAYFSDVDLEKDVHSGLIGPLLVCHTNTLNPAHGRQVTVQEFALFFTIFDETKSWYFTENMERNCRAPCNIQMEDPTFKENYRFHAINGYIMDTLPGLVMAQDQRIRWYLLSMGSNENIHSIHFSGHVFTVRKKEEYKMALYNLYPGVFETVEMLPSKAGIWRVECLIGEHLHAGMSTLFLVYSNKCQTPLGMASGHIRDFQITASGQYGQWAPKLARLHYSGSINAWSTKEPFSWIKVDLLAPMIIHGIKTQGARQKFSSLYISQFIIMYSLDGKKWQTYRGNSTGTLMVFFGNVDSSGIKHNIFNPPIIARYIRLHPTHYSIRSTLRMELMGCDLNSCSMPLGMESKAISDAQITASSYFTNMFATWSPSKARLHLQGRSNAWRPQVNNPKEWLQVDFQKTMKVTGVTTQGVKSLLTSMYVKEFLISSSQDGHQWTLFFQNGKVKVFQGNQDSFTPVVNSLDPPLLTRYLRIHPQSWVHQIALRMEVLGCEAQDLY

SEQ ID NO: 8 - protein, 2343 aa, Canis sp.
MQVELYTCCFLCLLPFSLSATRKYYLGAVELSWDYMQSDLLSALHADTSFSSRVPGSLPLTTSVTYRKTVFVEFTDDLFNIAKPRPPWMGLLGPTIQAEVYDTVVIVLKNMASHPVSLHAVGVSYWKASEGAEYEDQTSQKEKEDDNVIPGESHTYVWQVLKENGPMASDPPCLTYSYFSHVDLVKDLNSGLIGALLVCKEGSLAKERTQTLQEFVLLFAVFDEGKSWHSETNASLTQAEAQHELHTINGYVNRSLPGLTVCHKRSVYWHVIGMGTTPEVHSIFLEGHTFLVRNHRQASLEISPITFLTAQTFLMDLGQFLLFCHIPSHQHDGMEAYVKVDSCPEEPQLRMKNNEDKDYDDGLYDSDMDVVSFDDDSSSPFIQIRSVAKKHPKTWVHYIAAEEEDWDYAPSGPTPNDRSHKNLYLNNGPQRIGKKYKKVRFVAYTDETFKTREAIQYESGILGPLLYGEVGDTLLIIFKNQASRPYNIYPHGINYVTPLHTGRLPKGVKHLKDMPILPGEIFKYKWTVTVEDGPTKSDPRCLTRYYSSFINLERDLASGLIGPLLICYKESVDQRGNQMMSDKRNVILFSVFDENRSWYLTENMQRFLPNADVVQPHDPEFQLSNIMHSINGYVFDNLQLSVCLHEVAYWYILSVGAQTDFLSVFFSGYTFKHKMVYEDTLTLFPFSGETVFMSMENPGLWVLGCHNSDFRNRGMTALLKVSSCNRNIDDYYEDTYEDIPTPLLNENNVIKPRSFSQNSRHPSTKEKQLKATTTPENDIEKIDLQSGERTQLIKAQSVSSSDLLMLLGQNPTPRGLFLSDLREATDRADDHSRGAIERNKGPPEVASLRPELRHSEDREFTPEPELQLRLNENLGTNTTVELKKLDLKISSSSDSLMTSPTIPSDKLAAATEKTGSLGPPNMSVHFNSHLGTIVFGNNSSHLIQSGVPLELSEEDNDSKLLEAPLMNIQESSLRENVLSMESNRLFKEERIRGPASLIKDNALFKVNISSVKTNRAPVNLTTNRKTRVAIPTLLIENSTSVWQDIMLERNTEFKEVTSLIHNETFMDRNTTALGLNHVSNKTTLSKNVEMAHQKKEDPVPLRAENPDLSSSKIPFLPDWIKTHGKNSLSSEQRPSPKQLTSLGSEKSVKDQNFLSEEKVVVGEDEFTKDTELQEIFPNNKSIFFANLANVQENDTYNQEKKSPEEIERKEKLTQENVALPQAHTMIGTKNFLKNLFLLSTKQNVAGLEEQPYTPILQDTRSLNDSPHSEGIHMANFSKIREEANLEGLGNQTNQMVERFPSTTRMSSNASQHVITQRGKRSLKQPRLSQGEIKFERKVIANDTSTQWSKNMNYLAQGTLTQIEYNEKEKRAITQSPLSDCSMRNHVTIQMNDSALPVAKESASPSVRHTDLTKIPSQHNSSHLPASACNYTFRERTSGVQEGSHFLQEAKRNNLSLAFVTLGITEGQGKFSSLGKSATNQPMYKKLENTVLLQPGLSETSDKVELLSQVHVDQEDSFPTKTSNDSPGHLDLMGKIFLQKTQGPVKMNKTNSPGKVPFLKWATESSEKIPSKLLGVLAWDNHYDTQIPSEEWKSQKKSQTNTAFKRKDTILPLGPCENNDSTAAINEGQDKPQREAMWAKQGEPGRLCSQNPPVSKHHQREITVTTLQPEEDKFEYDDTFSIEMKREDFDIYGDYENQGLRSFQKKTRHYFIAAVERLWDYGMSRSPHILRNRAQSGDVQQFKKVVFQEFTDGSFTQPLYRGELNEHLGLLGPYIRAEVEDNIVVTFKNQASRPYSFYSSLISYDEDEGQGAEPRRKFVNPNETKIYFWKVQHHMAPTKDEFDCKAWAYFSDVDLEKDVHSGLIGPLLICRSNTLNPAHGRQVTVQEFALVFTIFDETKSWYFTENLERNCRAPCNVQKEDPTLKENFRFHAINGYVKDTLPGLVMAQDQKVRWYLLSMGSNENIHSIHFSGHVFTVRKKEEYKMAVYNLYPGVFETVEMLPSQVGIWRIECLIGEHLQAGMSTLFLVYSKKCQTPLGMASGHIRDFQITASGQYGQWAPKLARLHYSGSINAWSTKDPFSWIKVDLLAPMIIHGIMTQGARQKFSSLYVSQFIIMYSLDGNKWHSYRGNSTGTLMVFFGNVDSSGIKHNIFNPPIIAQYIRLHPTHYSIRSTLRMELLGCDFNSCSMPLGMESKAISDAQITASSYLSSMLATWSPSQARLHLQGRTNAWRPQANNPKEWLQVDFRKTMKVTGITTQGVKSLLISMYVKEFLISSSQDGHNWTLFLQNGKVKVFQGNRDSSTPVRNRLEPPLVARYVRLHPQSWAHHIALRLEVLGCDTQQPA

SEQ ID NO: 9 - protein, 2332 aa, Sus sp.; identical to SEQ ID NO: 7

SEQ ID NO: 10 - protein, 2300 aa, Mus sp.
AIRRYYLGAVELSWNYIQSDLLSVLHTDSRFLPRMSTSFPFNTSIMYKKTVFVEYKDQLFNIAKPRPPWMGLLGPTIWTEVHDTVVITLKNMASHPVSLHAVGVSYWKASEGDEYEDQTSQMEKEDDKVFPGESHTYVWQVLKENGPMASDPPCLTYSYMSHVDLVKDLNSGLIGALLVCKEGSLSKERTQMLYQFVLLFAVFDEGKSWHSETNDSYTQSMDSASARDWPKMHTVNGYVNRSLPGLIGCHRKSVYWHVIGMGTTPEIHSIFLEGHTFFVRNHRQASLEISPITFLTAQTLLIDLGQFLLFCHISSHKHDGMEAYVKVDSCPEESQWQKKNNNEEMEDYDDDLYSEMDMFTLDYDSSPFIQIRSVAKKYPKTWIHYISAEEEDWDYAPSVPTSDNGSYKSQYLSNGPHRIGRKYKKVRFIAYTDETFKTRETIQHESGLLGPLLYGEVGDTLLIIFKNQASRPYNIYPHGITDVSPLHARRLPRGIKHVKDLPIHPGEIFKYKWTVTVEDGPTKSDPRCLTRYYSSFINPERDLASGLIGPLLICYKESVDQRGNQMMSDKRNVILFSIFDENQSWYITENMQRFLPNAAKTQPQDPGFQASNIMHSINGYVFDSLELTVCLHEVAYWHILSVGAQTDFLSIFFSGYTFKHKMVYEDTLTLFPFSGETVFMSMENPGLWVLGCHNSDFRKRGMTALLKVSSCDKSTSDYYEEIYEDIPTQLVNENNVIDPRSFFQNTNHPNTRKKKFKDSTIPKNDMEKIEPQFEEIAEMLKVQSVSVSDMLMLLGQSHPTPHGLFLSDGQEAIYEAIHDDHSPNAIDSNEGPSKVTQLRPESHHSEKIVFTPQPGLQLRSNKSLETTIEVKWKKLGLQVSSLPSNLMTTTILSDNLKATFEKTDSSGFPDMPVHSSSKLSTTAFGKKAYSLVGSHVPLNASEENSDSNILDSTLMYSQESLPRDNILSIENDRLLREKRFHGIALLTKDNTLFKDNVSLMKTNKTYNHSTTNEKLHTESPTSIENSTTDLQDAILKVNSEIQEVTALIHDGTLLGKNSTYLRLNHMLNRTTSTKNKDIFHRKDEDPIPQDEENTIMPFSKMLFLSESSNWFKKTNGNNSLNSEQEHSPKQLVYLMFKKYVKNQSFLSEKNKVTVEQDGFTKNIGLKDMAFPHNMSIFLTTLSNVHENGRHNQEKNIQEEIEKEALIEEKVVLPQVHEATGSKNFLKDILILGTRQNISLYEVHVPVLQNITSINNSTNTVQIHMEHFFKRRKDKETNSEGLVNKTREMVKNYPSQKNITTQRSKRALGQFRLSTQWLKTINCSTQCIIKQIDHSKEMKKFITKSSLSDSSVIKSTTQTNSSDSHIVKTSAFPPIDLKRSPFQNKFSHVQASSYIYDFKTKSSRIQESNNFLKETKINNPSLAILPWNMFIDQGKFTSPGKSNTNSVTYKKRENIIFLKPTLPEESGKIELLPQVSIQEEEILPTETSHGSPGHLNLMKEVFLQKIQGPTKWNKAKRHGESIKGKTESSKNTRSKLLNHHAWDYHYAAQIPKDMWKSKEKSPEIISIKQEDTILSLRPHGNSHSIGANEKQNWPQRETTWVKQGQTQRTCSQIPPVLKRHQRELSAFQSEQEATDYDDAITIETIEDFDIYSEDIKQGPRSFQQKTRHYFIAAVERLWDYGMSTSHVLRNRYQSDNVPQFKKVVFQEFTDGSFSQPLYRGELNEHLGLLGPYIRAEVEDNIMVTFKNQASRPYSFYSSLISYKEDQRGEEPRRNFVKPNETKIYFWKVQHHMAPTEDEFDCKAWAYFSDVDLERDMHSGLIGPLLICHANTLNPAHGRQVSVQEFALLFTIFDETKSWYFTENVKRNCKTPCNFQMEDPTLKENYRFHAINGYVMDTLPGLVMAQDQRIRWYLLSMGNNENIQSIHFSGHVFTVRKKEEYKMAVYNLYPGVFETLEMIPSRAGIWRVECLIGEHLQAGMSTLFLVYSKQCQIPLGMASGSIRDFQITASGHYGQWAPNLARLHYSGSINAWSTKEPFSWIKVDLLAPMIVHGIKTQGARQKFSSLYISQFIIMYSLDGKKWLSYQGNSTGTLMVFFGNVDSSGIKHNSFNPPIIARYIRLHPTHSSIRSTLRMELMGCDLNSCSIPLGMESKVISDTQITASSYFTNMFATWSPSQARLHLQGRTNAWRPQVNDPKQWLQVDLQKTMKVTGIITQGVKSLFTSMFVKEFLISSSQDGHHWTQILYNGKVKVFQGNQDSSTPMMNSLDPPLLTRYLRIHPQIWEHQIALRLEILGCEAQQQY

SEQ ID NO: 11 - protein, 1457 aa, Artificial Sequence
  Description of Artificial Sequence: Synthetic polypeptide
MQIELSTCFFLCLLRFCFSATRRYYLGAVELSWDYMQSDLGELPVDARFPPRVPKSFPFNTSVVYKKTLFVEFTVHLFNIAKPRPPWMGLLGPTIQAEVYDTVVITLKNMASHPVSLHAVGVSYWKASEGAEYDDQTSQREKEDDKVFPGGSHTYVWQVLKENGPMASDPLCLTYSYLSHVDLVKDLNSGLIGALLVCREGSLAKEKTQTLHKFILLFAVFDEGKSWHSETKNSLMQDRDAASARAWPKMHTVNGYVNRSLPGLIGCHRKSVYWHVIGMGTTPEVHSIFLEGHTFLVRNHRQASLEISPITFLTAQTLLMDLGQFLLFCHISSHQHDGMEAYVKVDSCPEEPQLRMKNNEEAEDYDDDLTDSEMDVVRFDDDNSPSFIQIRSVAKKHPKTWVHYIAAEEEDWDYAPLVLAPDDRSYKSQYLNNGPQRIGRKYKKVRFMAYTDETFKTREAIQHESGILGPLLYGEVGDTLLIIFKNQASRPYNIYPHGITDVRPLYSRRLPKGVKHLKDFPILPGEIFKYKWTVTVEDGPTKSDPRCLTRYYSSFVNMERDLASGLIGPLLICYKESVDQRGNQIMSDKRNVILFSVFDENRSWYLTENIQRFLPNPAGVQLEDPEFQASNIMHSINGYVFDSLQLSVCLHEVAYWYILSIGAQTDFLSVFFSGYTFKHKMVYEDTLTLFPFSGETVFMSMENPGLWILGCHNSDFRNRGMTALLKVSSCDKNTGDYYEDSYEDISAYLLSKNNAIEPRSFSQNPPVLKRHQREITRTTLQSDQEEIDYDDTISVEMKKEDFDIYDEDENQSPRSFQKKTRHYFIAAVERLWDYGMSSSPHVLRNRAQSGSVPQFKKVVFQEFTDGSFTQPLYRGELNEHLGLLGPYIRAEVEDNIMVTFRNQASRPYSFYSSLISYEEDQRQGAEPRKNFVKPNETKTYFWKVQHHMAPTKDEFDCKAWAYFSDVDLEKDVHSGLIGPLLVCHTNTLNPAHGRQVTVQEFALFFTIFDETKSWYFTENMERNCRAPCNIQMEDPTFKENYRFHAINGYIMDTLPGLVMAQDQRIRWYLLSMGSNENIHSIHFSGHVFTVRKKEEYKMALYNLYPGVFETVEMLPSKAGIWRVECLIGEHLHAGMSTLFLVYSNKCQTPLGMASGHIRDFQITASGQYGQWAPKLARLHYSGSINAWSTKEPFSWIKVDLLAPMIIHGIKTQGARQKFSSLYISQFIIMYSLDGKKWQTYRGNSTGTLMVFFGNVDSSGIKHNIFNPPIIARYIRLHPTHYSIRSTLRMELMGCDLNSCSMPLGMESKAISDAQITASSYFTNMFATWSPSKARLHLQGRSNAWRPQVNNPKEWLQVDFQKTMKVTGVTTQGVKSLLTSMYVKEFLISSSQDGHQWTLFFQNGKVKVFQGNQDSFTPVVNSLDPPLLTRYLRIHPQSWVHQIALRMEVLGCEAQDLY

SEQ ID NO: 12 - protein, 1438 aa, Artificial Sequence
  Description of Artificial Sequence: Synthetic polypeptide
ATRRYYLGAVELSWDYMQSDLGELPVDARFPPRVPKSFPFNTSVVYKKTLFVEFTVHLFNIAKPRPPWMGLLGPTIQAEVYDTVVITLKNMASHPVSLHAVGVSYWKASEGAEYDDQTSQREKEDDKVFPGGSHTYVWQVLKENGPMASDPLCLTYSYLSHVDLVKDLNSGLIGALLVCREGSLAKEKTQTLHKFILLFAVFDEGKSWHSETKNSLMQDRDAASARAWPKMHTVNGYVNRSLPGLIGCHRKSVYWHVIGMGTTPEVHSIFLEGHTFLVRNHRQASLEISPITFLTAQTLLMDLGQFLLFCHISSHQHDGMEAYVKVDSCPEEPQLRMKNNEEAEDYDDDLTDSEMDVVRFDDDNSPSFIQIRSVAKKHPKTWVHYIAAEEEDWDYAPLVLAPDDRSYKSQYLNNGPQRIGRKYKKVRFMAYTDETFKTREAIQHESGILGPLLYGEVGDTLLIIFKNQASRPYNIYPHGITDVRPLYSRRLPKGVKHLKDFPILPGEIFKYKWTVTVEDGPTKSDPRCLTRYYSSFVNMERDLASGLIGPLLICYKESVDQRGNQIMSDKRNVILFSVFDENRSWYLTENIQRFLPNPAGVQLEDPEFQASNIMHSINGYVFDSLQLSVCLHEVAYWYILSIGAQTDFLSVFFSGYTFKHKMVYEDTLTLFPFSGETVFMSMENPGLWILGCHNSDFRNRGMTALLKVSSCDKNTGDYYEDSYEDISAYLLSKNNAIEPRSFSQNPPVLKRHQREITRTTLQSDQEEIDYDDTISVEMKKEDFDIYDEDENQSPRSFQKKTRHYFIAAVERLWDYGMSSSPHVLRNRAQSGSVPQFKKVVFQEFTDGSFTQPLYRGELNEHLGLLGPYIRAEVEDNIMVTFRNQASRPYSFYSSLISYEEDQRQGAEPRKNFVKPNETKTYFWKVQHHMAPTKDEFDCKAWAYFSDVDLEKDVHSGLIGPLLVCHTNTLNPAHGRQVTVQEFALFFTIFDETKSWYFTENMERNCRAPCNIQMEDPTFKENYRFHAINGYIMDTLPGLVMAQDQRIRWYLLSMGSNENIHSIHFSGHVFTVRKKEEYKMALYNLYPGVFETVEMLPSKAGIWRVECLIGEHLHAGMSTLFLVYSNKCQTPLGMASGHIRDFQITASGQYGQWAPKLARLHYSGSINAWSTKEPFSWIKVDLLAPMIIHGIKTQGARQKFSSLYISQFIIMYSLDGKKWQTYRGNSTGTLMVFFGNVDSSGIKHNIFNPPIIARYIRLHPTHYSIRSTLRMELMGCDLNSCSMPLGMESKAISDAQITASSYFTNMFATWSPSKARLHLQGRSNAWRPQVNNPKEWLQVDFQKTMKVTGVTTQGVKSLLTSMYVKEFLISSSQDGHQWTLFFQNGKVKVFQGNQDSFTPVVNSLDPPLLTRYLRIHPQSWVHQIALRMEVLGCEAQDLY

SEQ ID NO: 13 - protein, 1438 aa, Artificial Sequence
  Description of Artificial Sequence: Synthetic polypeptide
ATRRYYLGAVELSWDYMQSDLGELPVDARFPPRVPKSFPFNTSVVYKKTLFVEFTVHLFNIAKPRPPWMGLLGPTIQAEVYDTVVITLKNMASHPVSLHAVGVSYWKASEGAEYDDQTSQREKEDDKVFPGGSHTYVWQVLKENGPMASDPLCLTYSYLSHVDLVKDLNSGLIGALLVCREGSLAKEKTQTLHKFILLFAVFDEGKSWHSETKNSLMQDRDAASARAWPKMHTVNGYVNRSLPGLIGCHRKSVYWHVIGMGTTPEVHSIFLEGHTFLVRNHRQASLEISPITFLTAQTLLMDLGQFLLFCHISSHQHDGMEAYVKVDSCPEEPQLRMKNNEEAEDYDDDLTDSEMDVVRFDDDNSPSFIQIRSVAKKHPKTWVHYIAAEEEDWDYAPLVLAPDDRSYKSQYLNNGPQRIGRKYKKVRFMAYTDETFKTREAIQHESGILGPLLYGEVGDTLLIIFKNQASRPYNIYPHGITDVRPLYSRRLPKGVKHLKDFPILPGEIFKYKWTVTVEDGPTKSDPRCLTRYYSSFVNMERDLASGLIGPLLICYKESVDQRGNQIMSDKRNVILFSVFDENRSWYLTENIQRFLPNPAGVQLEDPEFQASNIMHSINGYVFDSLQLSVCLHEVAYWYILSIGAQTDFLSVFFSGYTFKHKMVYEDTLTLFPFSGETVFMSMENPGLWILGCHNSDFRNRGMTALLKVSSCDKNTGDYYEDSYEDISAYLLSKNNAIEPRSFSQNPPVLKRHQGEITRTTLQSDQEEIDYDDTISVEMKKEDFDIYDEDENQSPRSFQKKTRHYFIAAVERLWDYGMSSSPHVLRNRAQSGSVPQFKKVVFQEFTDGSFTQPLYRGELNEHLGLLGPYIRAEVEDNIMVTFRNQASRPYSFYSSLISYEEDQRQGAEPRKNFVKPNETKTYFWKVQHHMAPTKDEFDCKAWAYFSDVDLEKDVHSGLIGPLLVCHTNTLNPAHGRQVTVQEFALFFTIFDETKSWYFTENMERNCRAPCNIQMEDPTFKENYRFHAINGYIMDTLPGLVMAQDQRIRWYLLSMGSNENIHSIHFSGHVFTVRKKEEYKMALYNLYPGVFETVEMLPSKAGIWRVECLIGEHLHAGMSTLFLVYSNKCQTPLGMASGHIRDFQITASGQYGQWAPKLARLHYSGSINAWSTKEPFSWIKVDLLAPMIIHGIKTQGARQKFSSLYISQFIIMYSLDGKKWQTYRGNSTGTLMVFFGNVDSSGIKHNIFNPPIIARYIRLHPTHYSIRSTLRMELMGCDLNSCSMPLGMESKAISDAQITASSYFTNMFATWSPSKARLHLQGRSNAWRPQVNNPKEWLQVDFQKTMKVTGVTTQGVKSLLTSMYVKEFLISSSQDGHQWTLFFQNGKVKVFQGNQDSFTPVVNSLDPPLLTRYLRIHPQSWVHQIALRMEVLGCEAQDLY

SEQ ID NO: 14 - protein, 1391 aa, Artificial Sequence
  Description of Artificial Sequence: Synthetic polypeptide
ATRRYYLGAVELSWDYMQSDLGELPVDARFPPRVPKSFPFNTSVVYKKTLFVEFTVHLFNIAKPRPPWMGLLGPTIQAEVYDTVVITLKNMASHPVSLHAVGVSYWKASEGAEYDDQTSQREKEDDKVFPGGSHTYVWQVLKENGPMASDPLCLTYSYLSHVDLVKDLNSGLIGALLVCREGSLAKEKTQTLHKFILLFAVFDEGKSWHSETKNSLMQDRDAASARAWPKMHTVNGYVNRSLPGLIGCHRKSVYWHVIGMGTTPEVHSIFLEGHTFLVRNHRQASLEISPITFLTAQTLLMDLGQFLLFCHISSHQHDGMEAYVKVDSCPEEPQLRMKNNEEAEDYDDDLTDSEMDVVRFDDDNSPSFIQIRSVAKKHPKTWVHYIAAEEEDWDYAPLVLAPDDRSYKSQYLNNGPQRIGRKYKKVRFMAYTDETFKTREAIQHESGILGPLLYGEVGDTLLIIFKNQASRPYNIYPHGITDVRPLYSRRLPKGVKHLKDFPILPGEIFKYKWTVTVEDGPTKSDPRCLTRYYSSFVNMERDLASGLIGPLLICYKESVDQRGNQIMSDKRNVILFSVFDENRSWYLTENIQRFLPNPAGVQLEDPEFQASNIMHSINGYVFDSLQLSVCLHEVAYWYILSIGAQTDFLSVFFSGYTFKHKMVYEDTLTLFPFSGETVFMSMENPGLWILGCHNSDFRNRGMTALLKVSSCDKNTGDYYEDSYEDISAYLLSKNNAIEPRSFSQQSPRSFQKKTRHYFIAAVERLWDYGMSSSPHVLRNRAQSGSVPQFKKVVFQEFTDGSFTQPLYRGELNEHLGLLGPYIRAEVEDNIMVTFRNQASRPYSFYSSLISYEEDQRQGAEPRKNFVKPNETKTYFWKVQHHMAPTKDEFDCKAWAYFSDVDLEKDVHSGLIGPLLVCHTNTLNPAHGRQVTVQEFALFFTIFDETKSWYFTENMERNCRAPCNIQMEDPTFKENYRFHAINGYIMDTLPGLVMAQDQRIRWYLLSMGSNENIHSIHFSGHVFTVRKKEEYKMALYNLYPGVFETVEMLPSKAGIWRVECLIGEHLHAGMSTLFLVYSNKCQTPLGMASGHIRDFQITASGQYGQWAPKLARLHYSGSINAWSTKEPFSWIKVDLLAPMIIHGIKTQGARQKFSSLYISQFIIMYSLDGKKWQTYRGNSTGTLMVFFGNVDSSGIKHNIFNPPIIARYIRLHPTHYSIRSTLRMELMGCDLNSCSMPLGMESKAISDAQITASSYFTNMFATWSPSKARLHLQGRSNAWRPQVNNPKEWLQVDFQKTMKVTGVTTQGVKSLLTSMYVKEFLISSSQDGHQWTLFFQNGKVKVFQGNQDSFTPVVNSLDPPLLTRYLRIHPQSWVHQIALRMEVLGCEAQDLY

SEQ ID NO: 15 - protein, 1360 aa, Artificial Sequence
  Description of Artificial Sequence: Synthetic polypeptide
ATRRYYLGAVELSWDYMQSDLGELPVDARFPPRVPKSFPFNTSVVYKKTLFVEFTVHLFNIAKPRPPWMGLLGPTIQAEVYDTVVITLKNMASHPVSLHAVGVSYWKASEGAEYDDQTSQREKEDDKVFPGGSHTYVWQVLKENGPMASDPLCLTYSYLSHVDLVKDLNSGLIGALLVCREGSLAKEKTQTLHKFILLFAVFDEGKSWHSETKNSLMQDRDAASARAWPKMHTVNGYVNRSLPGLIGCHRKSVYWHVIGMGTTPEVHSIFLEGHTFLVRNHRQASLEISPITFLTAQTLLMDLGQFLLFCHISSHQHDGMEAYVKVDSCPEEPQLRMKNNEEAEDYDDDLTDSEMDVVRFDDDNSPSFIQIRSVAKKHPKTWVHYIAAEEEDWDYAPLVLAPDDRSYKSQYLNNGPQRIGRKYKKVRFMAYTDETFKTREAIQHESGILGPLLYGEVGDTLLIIFKNQASRPYNIYPHGITDVRPLYSRRLPKGVKHLKDFPILPGEIFKYKWTVTVEDGPTKSDPRCLTRYYSSFVNMERDLASGLIGPLLICYKESVDQRGNQIMSDKRNVILFSVFDENRSWYLTENIQRFLPNPAGVQLEDPEFQASNIMHSINGYVFDSLQLSVCLHEVAYWYILSIGAQTDFLSVFFSGYTFKHKMVYEDTLTLFPFSGETVFMSMENPGLWILGCHNSDFRNRGMTALLKVSSCDKQSPRSFQKKTRHYFIAAVERLWDYGMSSSPHVLRNRAQSGSVPQFKKVVFQEFTDGSFTQPLYRGELNEHLGLLGPYIRAEVEDNIMVTFRNQASRPYSFYSSLISYEEDQRQGAEPRKNFVKPNETKTYFWKVQHHMAPTKDEFDCKAWAYFSDVDLEKDVHSGLIGPLLVCHTNTLNPAHGRQVTVQEFALFFTIFDETKSWYFTENMERNCRAPCNIQMEDPTFKENYRFHAINGYIMDTLPGLVMAQDQRIRWYLLSMGSNENIHSIHFSGHVFTVRKKEEYKMALYNLYPGVFETVEMLPSKAGIWRVECLIGEHLHAGMSTLFLVYSNKCQTPLGMASGHIRDFQITASGQYGQWAPKLARLHYSGSINAWSTKEPFSWIKVDLLAPMIIHGIKTQGARQKFSSLYISQFIIMYSLDGKKWQTYRGNSTGTLMVFFGNVDSSGIKHNIFNPPIIARYIRLHPTHYSIRSTLRMELMGCDLNSCSMPLGMESKAISDAQITASSYFTNMFATWSPSKARLHLQGRSNAWRPQVNNPKEWLQVDFQKTMKVTGVTTQGVKSLLTSMYVKEFLISSSQDGHQWTLFFQNGKVKVFQGNQDSFTPVVNSLDPPLLTRYLRIHPQSWVHQIALRMEVLGCEAQDLY

SEQ ID NO: 16 - protein, 1436 aa, Artificial Sequence
  Description of Artificial Sequence: Synthetic polypeptide
ATRRYYLGAVELSWDYMQSDLGELPVDARFPPRVPKSFPFNTSVVYKKTLFVEFTDHLFNIAKPRPPWMGLLGPTIQAEVYDTVVITLKNMASHPVSLHAVGVSYWKASEGAEYDDQTSQREKEDDKVFPGGSHTYVWQVLKENGPMASDPLCLTYSYLSHVDLVKDLNSGLIGALLVCREGSLAKEKTQTLHKFILLFAVFDEGKSWHSETKNSLMQDRDAASARAWPKMHTVNGYVNRSLPGLIGCHRKSVYWHVIGMGTTPEVHSIFLEGHTFLVRNHRQASLEISPITFLTAQTLLMDLGQFLLFCHISSHQHDGMEAYVKVDSCPEEPQLRMKNNEEAEDYDDDLTDSEMDVVRFDDDNSPSFIQIRSVAKKHPKTWVHYIAAEEEDWDYAPLVLAPDDRSYKSQYLNNGPQRIGRKYKKVRFMAYTDETFKTREAIQHESGILGPLLYGEVGDTLLIIFKNQASRPYNIYPHGITDVRPLYSRRLPKGVKHLKDFPILPGEIFKYKWTVTVEDGPTKSDPRCLTRYYSSFVNMERDLASGLIGPLLICYKESVDQRGNQIMSDKRNVILFSVFDENRSWYLTENIQRFLPNPAGVQLEDPEFQASNIMHSINGYVFDSLQLSVCLHEVAYWYILSIGAQTDFLSVFFSGYTFKHKMVYEDTLTLFPFSGETVFMSMENPGLWILGCHNSDFRNRGMTALLKVSSCDKNTGDYYEDSYEDISAYLLSKNNAIEPRSFSQNSRHPSTRQKQFNATTIPENDIEKTDTISVEMKKEDFDIYDEDENQSPRSFQKKTRHYFIAAVERLWDYGMSSSPHVLRNRAQSGSVPQFKKVVFQEFTDGSFTQPLYRGELNEHLGLLGPYIRAEVEDNIMVTFRNQASRPYSFYSSLISYEEDQRQGAEPRKNFVKPNETKTYFWKVQHHMAPTKDEFDCKAWAYFSDVDLEKDVHSGLIGPLLVCHTNTLNPAHGRQVTVQEFALFFTIFDETKSWYFTENMERNCRAPCNIQMEDPTFKENYRFHAINGYIMDTLPGLVMAQDQRIRWYLLSMGSNENIHSIHFSGHVFTVRKKEEYKMALYNLYPGVFETVEMLPSKAGIWRVECLIGEHLHAGMSTLFLVYSNKCQTPLGMASGHIRDFQITASGQYGQWAPKLARLHYSGSINAWSTKEPFSWIKVDLLAPMIIHGIKTQGARQKFSSLYISQFIIMYSLDGKKWQTYRGNSTGTLMVFFGNVDSSGIKHNIFNPPIIARYIRLHPTHYSIRSTLRMELMGCDLNSCSMPLGMESKAISDAQITASSYFTNMFATWSPSKARLHLQGRSNAWRPQVNNPKEWLQVDFQKTMKVTGVTTQGVKSLLTSMYVKEFLISSSQDGHQWTLFFQNGKVKVFQGNQDSFTPVVNSLDPPLLTRYLRIHPQSWVHQIALRMEVLGCEAQDLY

SEQ ID NO: 17 - protein, 1390 aa, Artificial Sequence
  Description of Artificial Sequence: Synthetic polypeptide
ATRRYYLGAVELSWDYMQSDLGELPVDARFPPRVPKSFPFNTSVVYKKTLFVEFTVHLFNIAKPRPPWMGLLGPTIQAEVYDTVVITLKNMASHPVSLHAVGVSYWKASEGAEYDDQTSQREKEDDKVFPGGSHTYVWQVLKENGPMASDPLCLTYSYLSHVDLVKDLNSGLIGALLVCREGSLAKEKTQTLHKFILLFAVFDEGKSWHSETKNSLMQDRDAASARAWPKMHTVNGYVNRSLPGLIGCHRKSVYWHVIGMGTTPEVHSIFLEGHTFLVRNHRQASLEISPITFLTAQTLLMDLGQFLLFCHISSHQHDGMEAYVKVDSCPEEPQLRMKNNEEAEDYDDDLTDSEMDVVRFDDDNSPSFIQIRSVAKKHPKTWVHYIAAEEEDWDYAPLVLAPDDRSYKSQYLNNGPQRIGRKYKKVRFMAYTDETFKTREAIQHESGILGPLLYGEVGDTLLIIFKNQASRPYNIYPHGITDVRPLYSRRLPKGVKHLKDFPILPGEIFKYKWTVTVEDGPTKSDPRCLTRYYSSFVNMERDLASGLIGPLLICYKESVDQRGNQIMSDKRNVILFSVFDENRSWYLTENIQRFLPNPAGVQLEDPEFQASNIMHSINGYVFDSLQLSVCLHEVAYWYILSIGAQTDFLSVFFSGYTFKHKMVYEDTLTLFPFSGETVFMSMENPGLWILGCHNSDFRNRGMTALLKVSSCDKNTGDYYEDSYEDISAYLLSKNNAIEPRSFSQSPRSFQKKTRHYFIAAVERLWDYGMSSSPHVLRNRAQSGSVPQFKKVVFQEFTDGSFTQPLYRGELNEHLGLLGPYIRAEVEDNIMVTFRNQASRPYSFYSSLISYEEDQRQGAEPRKNFVKPNETKTYFWKVQHHMAPTKDEFDCKAWAYFSDVDLEKDVHSGLIGPLLVCHTNTLNPAHGRQVTVQEFALFFTIFDETKSWYFTENMERNCRAPCNIQMEDPTFKENYRFHAINGYIMDTLPGLVMAQDQRIRWYLLSMGSNENIHSIHFSGHVFTVRKKEEYKMALYNLYPGVFETVEMLPSKAGIWRVECLIGEHLHAGMSTLFLVYSNKCQTPLGMASGHIRDFQITASGQYGQWAPKLARLHYSGSINAWSTKEPFSWIKVDLLAPMIIHGIKTQGARQKFSSLYISQFIIMYSLDGKKWQTYRGNSTGTLMVFFGNVDSSGIKHNIFNPPIIARYIRLHPTHYSIRSTLRMELMGCDLNSCSMPLGMESKAISDAQITASSYFTNMFATWSPSKARLHLQGRSNAWRPQVNNPKEWLQVDFQKTMKVTGVTTQGVKSLLTSMYVKEFLISSSQDGHQWTLFFQNGKVKVFQGNQDSFTPVVNSLDPPLLTRYLRIHPQSWVHQIALRMEVLGCEAQDLY

SEQ ID NO: 18 - protein, 1457 aa, Artificial Sequence
  Description of Artificial Sequence: Synthetic polypeptide
MQIELSTCFFLCLLRFCFSATRRYYLGAVELSWDYMQSDLGELPVDARFPPRVPKSFPFNTSVVYKKTLFVEFTDHLFNIAKPRPPWMGLLGPTIQAEVYDTVVITLKNMASHPVSLHAVGVSYWKASEGAEYDDQTSQREKEDDKVFPGGSHTYVWQVLKENGPMASDPLCLTYSYLSHVDLVKDLNSGLIGALLVCREGSLAKEKTQTLHKFILLFAVFDEGKSWHSETKNSLMQDRDAASARAWPKMHTVNGYVNRSLPGLIGCHRKSVYWHVIGMGTTPEVHSIFLEGHTFLVRNHRQASLEISPITFLTAQTLLMDLGQFLLFCHISSHQHDGMEAYVKVDSCPEEPQLRMKNNEEAEDYDDDLTDSEMDVVRFDDDNSPSFIQIRSVAKKHPKTWVHYIAAEEEDWDYAPLVLAPDDRSYKSQYLNNGPQRIGRKYKKVRFMAYTDETFKTREAIQHESGILGPLLYGEVGDTLLIIFKNQASRPYNIYPHGITDVRPLYSRRLPKGVKHLKDFPILPGEIFKYKWTVTVEDGPTKSDPRCLTRYYSSFVNMERDLASGLIGPLLICYKESVDQRGNQIMSDKRNVILFSVFDENRSWYLTENIQRFLPNPAGVQLEDPEFQASNIMHSINGYVFDSLQLSVCLHEVAYWYILSIGAQTDFLSVFFSGYTFKHKMVYEDTLTLFPFSGETVFMSMENPGLWILGCHNSDFRNRGMTALLKVSSCDKNTGDYYEDSYEDISAYLLSKNNAIEPRSFSQNPPVLKRHQREITRTTLQSDQEEIDYDDTISVEMKKEDFDIYDEDENQSPRSFQKKTRHYFIAAVERLWDYGMSSSPHVLRNRAQSGSVPQFKKVVFQEFTDGSFTQPLYRGELNEHLGLLGPYIRAEVEDNIMVTFRNQASRPYSFYSSLISYEEDQRQGAEPRKNFVKPNETKTYFWKVQHHMAPTKDEFDCKAWAYFSDVDLEKDVHSGLIGPLLVCHTNTLNPAHGRQVTVQEFALFFTIFDETKSWYFTENMERNCRAPCNIQMEDPTFKENYRFHAINGYIMDTLPGLVMAQDQRIRWYLLSMGSNENIHSIHFSGHVFTVRKKEEYKMALYNLYPGVFETVEMLPSKAGIWRVECLIGEHLHAGMSTLFLVYSNKCQTPLGMASGHIRDFQITASGQYGQWAPKLARLHYSGSINAWSTKEPFSWIKVDLLAPMIIHGIKTQGARQKFSSLYISQFIIMYSLDGKKWQTYRGNSTGTLMVFFGNVDSSGIKHNIFNPPIIARYIRLHPTHYSIRSTLRMELMGCDLNSCSMPLGMESKAISDAQITASSYFTNMFATWSPSKARLHLQGRSNAWRPQVNNPKEWLQVDFQKTMKVTGVTTQGVKSLLTSMYVKEFLISSSQDGHQWTLFFQNGKVKVFQGNQDSFTPVVNSLDPPLLTRYLRIHPQSWVHQIALRMEVLGCEAQDLY

SEQ ID NO: 19 - protein, 1438 aa, Artificial Sequence
  Description of Artificial Sequence: Synthetic polypeptide
ATRRYYLGAVELSWDYMQSDLGELPVDARFPPRVPKSFPFNTSVVYKKTLFVEFTDHLFNIAKPRPPWMGLLGPTIQAEVYDTVVITLKNMASHPVSLHAVGVSYWKASEGAEYDDQTSQREKEDDKVFPGGSHTYVWQVLKENGPMASDPLCLTYSYLSHVDLVKDLNSGLIGALLVCREGSLAKEKTQTLHKFILLFAVFDEGKSWHSETKNSLMQDRDAASARAWPKMHTVNGYVNRSLPGLIGCHRKSVYWHVIGMGTTPEVHSIFLEGHTFLVRNHRQASLEISPITFLTAQTLLMDLGQFLLFCHISSHQHDGMEAYVKVDSCPEEPQLRMKNNEEAEDYDDDLTDSEMDVVRFDDDNSPSFIQIRSVAKKHPKTWVHYIAAEEEDWDYAPLVLAPDDRSYKSQYLNNGPQRIGRKYKKVRFMAYTDETFKTREAIQHESGILGPLLYGEVGDTLLIIFKNQASRPYNIYPHGITDVRPLYSRRLPKGVKHLKDFPILPGEIFKYKWTVTVEDGPTKSDPRCLTRYYSSFVNMERDLASGLIGPLLICYKESVDQRGNQIMSDKRNVILFSVFDENRSWYLTENIQRFLPNPAGVQLEDPEFQASNIMHSINGYVFDSLQLSVCLHEVAYWYILSIGAQTDFLSVFFSGYTFKHKMVYEDTLTLFPFSGETVFMSMENPGLWILGCHNSDFRNRGMTALLKVSSCDKNTGDYYEDSYEDISAYLLSKNNAIEPRSFSQNPPVLKRHQREITRTTLQSDQEEIDYDDTISVEMKKEDFDIYDEDENQSPRSFQKKTRHYFIAAVERLWDYGMSSSPHVLRNRAQSGSVPQFKKVVFQEFTDGSFTQPLYRGELNEHLGLLGPYIRAEVEDNIMVTFRNQASRPYSFYSSLISYEEDQRQGAEPRKNFVKPNETKTYFWKVQHHMAPTKDEFDCKAWAYFSDVDLEKDVHSGLIGPLLVCHTNTLNPAHGRQVTVQEFALFFTIFDETKSWYFTENMERNCRAPCNIQMEDPTFKENYRFHAINGYIMDTLPGLVMAQDQRIRWYLLSMGSNENIHSIHFSGHVFTVRKKEEYKMALYNLYPGVFETVEMLPSKAGIWRVECLIGEHLHAGMSTLFLVYSNKCQTPLGMASGHIRDFQITASGQYGQWAPKLARLHYSGSINAWSTKEPFSWIKVDLLAPMIIHGIKTQGARQKFSSLYISQFIIMYSLDGKKWQTYRGNSTGTLMVFFGNVDSSGIKHNIFNPPIIARYIRLHPTHYSIRSTLRMELMGCDLNSCSMPLGMESKAISDAQITASSYFTNMFATWSPSKARLHLQGRSNAWRPQVNNPKEWLQVDFQKTMKVTGVTTQGVKSLLTSMYVKEFLISSSQDGHQWTLFFQNGKVKVFQGNQDSFTPVVNSLDPPLLTRYLRIHPQSWVHQIALRMEVLGCEAQDLY

SEQ ID NO: 20 - protein, 12 aa, Artificial Sequence
  Description of Artificial Sequence: Synthetic peptide
GESPGGSSGSES

SEQ ID NO: 21 - protein, 12 aa, Artificial Sequence
  Description of Artificial Sequence: Synthetic peptide
GSEGSSGPGESS

SEQ ID NO: 22 - protein, 12 aa, Artificial Sequence
  Description of Artificial Sequence: Synthetic peptide
GSSESGSSEGGP

SEQ ID NO: 23 - protein, 12 aa, Artificial Sequence
  Description of Artificial Sequence: Synthetic peptide
GSGGEPSESGSS

SEQ ID NO: 24 - protein, 12 aa, Artificial Sequence
  Description of Artificial Sequence: Synthetic peptide
GSPAGSPTSTEE

SEQ ID NO: 25 - protein, 12 aa, Artificial Sequence
  Description of Artificial Sequence: Synthetic peptide
GSEPATSGSETP

SEQ ID NO: 26 - protein, 12 aa, Artificial Sequence
  Description of Artificial Sequence: Synthetic peptide
GTSESATPESGP

SEQ ID NO: 27 - protein, 12 aa, Artificial Sequence
  Description of Artificial Sequence: Synthetic peptide
GTSTEPSEGSAP

SEQ ID NO: 28 - protein, 12 aa, Artificial Sequence
  Description of Artificial Sequence: Synthetic peptide
GSTSESPSGTAP

SEQ ID NO: 29 - protein, 12 aa, Artificial Sequence
  Description of Artificial Sequence: Synthetic peptide
GTSTPESGSASP

SEQ ID NO: 30 - protein, 12 aa, Artificial Sequence
  Description of Artificial Sequence: Synthetic peptide
GTSPSGESSTAP

SEQ ID NO: 31 - protein, 12 aa, Artificial Sequence
  Description of Artificial Sequence: Synthetic peptide
GSTSSTAESPGP

SEQ ID NO: 32 - protein, 12 aa, Artificial Sequence
  Description of Artificial Sequence: Synthetic peptide
GTPGSGTASSSP

SEQ ID NO: 33 - protein, 12 aa, Artificial Sequence
  Description of Artificial Sequence: Synthetic peptide
GSSTPSGATGSP

SEQ ID NO: 34 - protein, 12 aa, Artificial Sequence
  Description of Artificial Sequence: Synthetic peptide
GSSPSASTGTGP

SEQ ID NO: 35 - protein, 12 aa, Artificial Sequence
  Description of Artificial Sequence: Synthetic peptide
GASPGTSSTGSP

SEQ ID NO: 36 - protein, 12 aa, Artificial Sequence
  Description of Artificial Sequence: Synthetic peptide
GEPAGSPTSTSE

SEQ ID NO: 37 - protein, 12 aa, Artificial Sequence
  Description of Artificial Sequence: Synthetic peptide
GTGEPSSTPASE

SEQ ID NO: 38 - protein, 12 aa, Artificial Sequence
  Description of Artificial Sequence: Synthetic peptide
GSGPSTESAPTE

SEQ ID NO: 39 - protein, 12 aa, Artificial Sequence
  Description of Artificial Sequence: Synthetic peptide
GSETPSGPSETA

SEQ ID NO: 40 - protein, 12 aa, Artificial Sequence
  Description of Artificial Sequence: Synthetic peptide
GPSETSTSEPGA

SEQ ID NO: 41 - protein, 12 aa, Artificial Sequence
  Description of Artificial Sequence: Synthetic peptide
GSPSEPTEGTSA

SEQ ID NO: 42 - protein, 12 aa, Artificial Sequence
  Description of Artificial Sequence: Synthetic peptide
GSGASEPTSTEP

SEQ ID NO: 43 - protein, 12 aa, Artificial Sequence
  Description of Artificial Sequence: Synthetic peptide
GSEPATSGTEPS

SEQ ID NO: 44 - protein, 12 aa, Artificial Sequence
  Description of Artificial Sequence: Synthetic peptide
GTSEPSTSEPGA

SEQ ID NO: 45 - protein, 12 aa, Artificial Sequence
  Description of Artificial Sequence: Synthetic peptide
GTSTEPSEPGSA

SEQ ID NO: 46 - protein, 12 aa, Artificial Sequence
  Description of Artificial Sequence: Synthetic peptide
GSTAGSETSTEA

SEQ ID NO: 47 - protein, 12 aa, Artificial Sequence
  Description of Artificial Sequence: Synthetic peptide
GSETATSGSETA

SEQ ID NO: 48 - protein, 12 aa, Artificial Sequence
  Description of Artificial Sequence: Synthetic peptide
GTSESATSESGA

SEQ ID NO: 49 - protein, 12 aa, Artificial Sequence
  Description of Artificial Sequence: Synthetic peptide
GTSTEASEGSAS

SEQ ID NO: 50 - protein, 42 aa, Artificial Sequence
  Description of Artificial Sequence: Synthetic polypeptide
TEPSEGSAPGSPAGSPTSTEEGTSESATPESGPGSEPATSGS

SEQ ID NO: 51 - protein, 42 aa, Artificial Sequence
  Description of Artificial Sequence: Synthetic polypeptide
PAGSPTSTEEGTSTEPSEGSAPGTSESATPESGPGSEPATSG

SEQ ID NO: 52 - protein, 42 aa, Artificial Sequence
  Description of Artificial Sequence: Synthetic polypeptide
SEPATSGSETPGTSESATPESGPGTSTEPSEGSAPGSPAGSP

SEQ ID NO: 53 - protein, 42 aa, Artificial Sequence
  Description of Artificial Sequence: Synthetic polypeptide
GAPGSPAGSPTSTEEGTSESATPESGPGSEPATSGSETPASS

SEQ ID NO: 54 - protein, 42 aa, Artificial Sequence
  Description of Artificial Sequence: Synthetic polypeptide
GAPSPSASTGTGPGTPGSGTASSSPGSSTPSGATGSPGPSGP

SEQ ID NO: 55 - protein, 42 aa, Artificial Sequence
  Description of Artificial Sequence: Synthetic polypeptide
GPGTPGSGTASSSPGSSTPSGATGSPGSSPSASTGTGPGASP

SEQ ID NO: 56 - protein, 42 aa, Artificial Sequence
  Description of Artificial Sequence: Synthetic polypeptide
SPSASTGTGPGASPGTSSTGSPGTPGSGTASSSPGSSTPSGA

SEQ ID NO: 57 - protein, 42 aa, Artificial Sequence
  Description of Artificial Sequence: Synthetic polypeptide
SASTGTGPGASPGTSSTGSPGTPGSGTASSSPGSSTPSGATG

SEQ ID NO: 58 - protein, 48 aa, Artificial Sequence
  Description of Artificial Sequence: Synthetic polypeptide
MAEPAGSPTSTEEGTPGSGTASSSPGSSTPSGATGSPGASPGTSSTGS

SEQ ID NO: 59 - protein, 48 aa, Artificial Sequence
  Description of Artificial Sequence: Synthetic polypeptide
MAEPAGSPTSTEEGASPGTSSTGSPGSSTPSGATGSPGSSTPSGATGS

SEQ ID NO: 60 - protein, 144 aa, Artificial Sequence
  Description of Artificial Sequence: Synthetic polypeptide
GSEPATSGSETPGTSESATPESGPGSEPATSGSETPGSPAGSPTSTEEGTSTEPSEGSAPGSEPATSGSETPGSEPATSGSETPGSEPATSGSETPGTSTEPSEGSAPGTSESATPESGPGSEPATSGSETPGTSTEPSEGSAP

SEQ ID NO: 61 - protein, 144 aa, Artificial Sequence
  Description of Artificial Sequence: Synthetic polypeptide
GTSTPESGSASPGTSPSGESSTAPGTSPSGESSTAPGSTSSTAESPGPGSTSESPSGTAPGSTSSTAESPGPGTSPSGESSTAPGTSTPESGSASPGSTSSTAESPGPGTSPSGESSTAPGTSPSGESSTAPGTSPSGESSTAP

SEQ ID NO: 62 - protein, 144 aa, Artificial Sequence
  Description of Artificial Sequence: Synthetic polypeptide
PGSSPSASTGTGPGSSPSASTGTGPGTPGSGTASSSPGSSTPSGATGSPGSSPSASTGTGPGASPGTSSTGSPGTPGSGTASSSPGSSTPSGATGSPGTPGSGTASSSPGASPGTSSTGSPGASPGTSSTGSPGTPGSGTASSS

SEQ ID NO: 63 - protein, 144 aa, Artificial Sequence
  Description of Artificial Sequence: Synthetic polypeptide
SGTASSSPGSSTPSGATGSPGTPGSGTASSSPGSSTPSGATGSPGSSTPSGATGSPGSSPSASTGTGPGSSPSASTGTGPGASPGTSSTGSPGTPGSGTASSSPGSSTPSGATGSPGSSPSASTGTGPGSSPSASTGTGPGASP

SEQ ID NO: 64 - protein, 144 aa, Artificial Sequence
  Description of Artificial Sequence: Synthetic polypeptide
GTPGSGTASSSPGSSTPSGATGSPGSSTPSGATGSPGSSPSASTGTGPGSSPSASTGTGPGASPGTSSTGSPGTPGSGTASSSPGSSTPSGATGSPGSSPSASTGTGPGSSPSASTGTGPGASPGTSSTGSPGASPGTSSTGSP

SEQ ID NO: 65 - protein, 144 aa, Artificial Sequence
  Description of Artificial Sequence: Synthetic polypeptide
GTPGSGTASSSPGSSTPSGATGSPGSSPSASTGTGPGSSPSASTGTGPGASPGTSSTGSPGASPGTSSTGSPGSSTPSGATGSPGSSPSASTGTGPGASPGTSSTGSPGSSPSASTGTGPGTPGSGTASSSPGSSTPSGATGSP

SEQ ID NO: 66 - protein, 288 aa, Artificial Sequence
  Description of Artificial Sequence: Synthetic polypeptide
GTSESATPESGPGSEPATSGSETPGTSESATPESGPGSEPATSGSETPGTSESATPESGPGTSTEPSEGSAPGSPAGSPTSTEEGTSESATPESGPGSEPATSGSETPGTSESATPESGPGSPAGSPTSTEEGSPAGSPTSTEEGTSTEPSEGSAPGTSESATPESGPGTSESATPESGPGTSESATPESGPGSEPATSGSETPGSEPATSGSETPGSPAGSPTSTEEGTSTEPSEGSAPGTSTEPSEGSAPGSEPATSGSETPGTSESATPESGPGTSTEPSEGSAP

SEQ ID NO: 67 - protein, 316 aa, Artificial Sequence
  Description of Artificial Sequence: Synthetic polypeptide
ASSSPGASPGTSSTGSPGASPGTSSTGSPGASPGTSSTGSPGASPGTSSTGSPGTPGSGTASSSPGSSTPSGATGSPGTPGSGTASSSPGSSTPSGATGSPGTPGSGTASSSPGSSTPSGATGSPGSSTPSGATGSPGSSPSASTGTGPGSSPSASTGTGPGASPGTSSTGSPGTPGSGTASSSPGSSTPSGATGSPGSSPSASTGTGPGSSPSASTGTGPGASPGTSSTGSPGASPGTSSTGSPGSSTPSGATGSPGSSPSASTGTGPGASPGTSSTGSPGSSPSASTGTGPGTPGSGTASSSPGSSTPSGATGS

SEQ ID NO: 68 - protein, 288 aa, Artificial Sequence
  Description of Artificial Sequence: Synthetic polypeptide
PGASPGTSSTGSPGASPGTSSTGSPGTPGSGTASSSPGSSTPSGATGSPGTPGSGTASSSPGSSTPSGATGSPGTPGSGTASSSPGSSTPSGATGSPGSSTPSGATGSPGSSPSASTGTGPGSSPSASTGTGPGASPGTSSTGSPGTPGSGTASSSPGSSTPSGATGSPGSSPSASTGTGPGSSPSASTGTGPGASPGTSSTGSPGASPGTSSTGSPGSSTPSGATGSPGSSPSASTGTGPGASPGTSSTGSPGSSPSASTGTGPGTPGSGTASSSPGSSTPSGATGS

SEQ ID NO: 69 - protein, 288 aa, Artificial Sequence
  Description of Artificial Sequence: Synthetic polypeptide
GSSPSASTGTGPGSSPSASTGTGPGTPGSGTASSSPGSSTPSGATGSPGSSPSASTGTGPGASPGTSSTGSPGTPGSGTASSSPGSSTPSGATGSPGTPGSGTASSSPGASPGTSSTGSPGASPGTSSTGSPGTPGSGTASSSPGSSTPSGATGSPGASPGTSSTGSPGTPGSGTASSSPGSSTPSGATGSPGSSPSASTGTGPGSSPSASTGTGPGSSTPSGATGSPGSSTPSGATGSPGASPGTSSTGSPGASPGTSSTGSPGASPGTSSTGSPGTPGSGTASSSP

SEQ ID NO: 70 - protein, 504 aa, Artificial Sequence
  Description of Artificial Sequence: Synthetic polypeptide
  MOD_RES (63)..(63): Any amino acid
  MOD_RES (207)..(207): Any amino acid
GASPGTSSTGSPGSSPSASTGTGPGSSPSASTGTGPGTPGSGTASSSPGSSTPSGATGSPGSXPSASTGTGPGASPGTSSTGSPGTPGSGTASSSPGSSTPSGATGSPGTPGSGTASSSPGASPGTSSTGSPGASPGTSSTGSPGTPGSGTASSSPGSSTPSGATGSPGASPGTSSTGSPGTPGSGTASSSPGSSTPSGATGSPGSXPSASTGTGPGSSPSASTGTGPGSSTPSGATGSPGSSTPSGATGSPGASPGTSSTGSPGASPGTSSTGSPGASPGTSSTGSPGTPGSGTASSSPGASPGTSSTGSPGASPGTSSTGSPGASPGTSSTGSPGSSPSASTGTGPGTPGSGTASSSPGASPGTSSTGSPGASPGTSSTGSPGASPGTSSTGSPGSSTPSGATGSPGSSTPSGATGSPGASPGTSSTGSPGTPGSGTASSSPGSSTPSGATGSPGSSTPSGATGSPGSSTPSGATGSPGSSPSASTGTGPGASPGTSSTGSP

SEQ ID NO: 71 - protein, 540 aa, Artificial Sequence
  Description of Artificial Sequence: Synthetic polypeptide
GSTSSTAESPGPGSTSSTAESPGPGSTSESPSGTAPGSTSSTAESPGPGSTSSTAESPGPGTSTPESGSASPGSTSESPSGTAPGTSPSGESSTAPGSTSESPSGTAPGSTSESPSGTAPGTSPSGESSTAPGSTSESPSGTAPGSTSESPSGTAPGTSPSGESSTAPGSTSESPSGTAPGSTSESPSGTAPGSTSESPSGTAPGTSTPESGSASPGSTSESPSGTAPGTSTPESGSASPGSTSSTAESPGPGSTSSTAESPGPGTSTPESGSASPGTSTPESGSASPGSTSESPSGTAPGTSTPESGSASPGTSTPESGSASPGSTSESPSGTAPGSTSESPSGTAPGSTSESPSGTAPGSTSSTAESPGPGTSTPESGSASPGTSTPESGSASPGSTSESPSGTAPGSTSESPSGTAPGTSTPESGSASPGSTSESPSGTAPGSTSESPSGTAPGTSTPESGSASPGTSPSGESSTAPGSTSSTAESPGPGTSPSGESSTAPGSTSSTAESPGPGTSTPESGSASPGSTSESPSGTAP

SEQ ID NO: 72 - protein, 576 aa, Artificial Sequence
  Description of Artificial Sequence: Synthetic polypeptide
GSSESGSSEGGPGSGGEPSESGSSGSSESGSSEGGPGSSESGSSEGGPGSSESGSSEGGPGSSESGSSEGGPGSSESGSSEGGPGESPGGSSGSESGSEGSSGPGESSGSSESGSSEGGPGSSESGSSEGGPGSSESGSSEGGPGSGGEPSESGSSGESPGGSSGSESGESPGGSSGSESGSGGEPSESGSSGSSESGSSEGGPGSGGEPSESGSSGSGGEPSESGSSGSEGSSGPGESSGESPGGSSGSESGSGGEPSESGSSGSGGEPSESGSSGSGGEPSESGSSGSSESGSSEGGPGESPGGSSGSESGESPGGSSGSESGESPGGSSGSESGESPGGSSGSESGESPGGSSGSESGSSESGSSEGGPGSGGEPSESGSSGSEGSSGPGESSGSSESGSSEGGPGSGGEPSESGSSGSSESGSSEGGPGSGGEPSESGSSGESPGGSSGSESGESPGGSSGSESGSSESGSSEGGPGSGGEPSESGSSGSSESGSSEGGPGSGGEPSESGSSGSGGEPSESGSSGESPGGSSGSESGSEGSSGPGESSGSSESGSSEGGPGSEGSSGPGESS

SEQ ID NO: 73 - protein, 576 aa, Artificial Sequence
  Description of Artificial Sequence: Synthetic polypeptide
GSPAGSPTSTEEGTSESATPESGPGTSTEPSEGSAPGSPAGSPTSTEEGTSTEPSEGSAPGTSTEPSEGSAPGTSESATPESGPGSEPATSGSETPGSEPATSGSETPGSPAGSPTSTEEGTSESATPESGPGTSTEPSEGSAPGTSTEPSEGSAPGSPAGSPTSTEEGTSTEPSEGSAPGTSTEPSEGSAPGTSESATPESGPGTSTEPSEGSAPGTSESATPESGPGSEPATSGSETPGTSTEPSEGSAPGTSTEPSEGSAPGTSESATPESGPGTSESATPESGPGSPAGSPTSTEEGTSESATPESGPGSEPATSGSETPGTSESATPESGPGTSTEPSEGSAPGTSTEPSEGSAPGTSTEPSEGSAPGTSTEPSEGSAPGTSTEPSEGSAPGTSTEPSEGSAPGSPAGSPTSTEEGTSTEPSEGSAPGTSESATPESGPGSEPATSGSETPGTSESATPESGPGSEPATSGSETPGTSESATPESGPGTSTEPSEGSAPGTSESATPESGPGSPAGSPTSTEEGSPAGSPTSTEEGSPAGSPTSTEEGTSESATPESGPGTSTEPSEGSAP

SEQ ID NO: 74 - protein, 576 aa, Artificial Sequence
  Description of Artificial Sequence: Synthetic polypeptide
GSTSSTAESPGPGSTSSTAESPGPGSTSESPSGTAPGSTSSTAESPGPGSTSSTAESPGPGTSTPESGSASPGSTSESPSGTAPGTSPSGESSTAPGSTSESPSGTAPGSTSESPSGTAPGTSPSGESSTAPGSTSESPSGTAPGSTSESPSGTAPGTSPSGESSTAPGSTSESPSGTAPGSTSESPSGTAPGSTSESPSGTAPGTSTPESGSASPGSTSESPSGTAPGTSTPESGSASPGSTSSTAESPGPGSTSSTAESPGPGTSTPESGSASPGTSTPESGSASPGSTSESPSGTAPGTSTPESGSASPGTSTPESGSASPGSTSESPSGTAPGSTSESPSGTAPGSTSESPSGTAPGSTSSTAESPGPGTSTPESGSASPGTSTPESGSASPGSTSESPSGTAPGSTSESPSGTAPGTSTPESGSASPGSTSESPSGTAPGSTSESPSGTAPGTSTPESGSASPGTSPSGESSTAPGSTSSTAESPGPGTSPSGESSTAPGSTSSTAESPGPGTSTPESGSASPGSTSESPSGTAPGSTSSTAESPGPGTSTPESGSASPGTSTPESGSASP

SEQ ID NO: 75 - protein, 576 aa, Artificial Sequence
  Description of Artificial Sequence: Synthetic polypeptide
PGTPGSGTASSSPGSSTPSGATGSPGSSPSASTGTGPGSSPSASTGTGPGSSTPSGATGSPGSSTPSGATGSPGASPGTSSTGSPGASPGTSSTGSPGASPGTSSTGSPGTPGSGTASSSPGASPGTSSTGSPGASPGTSSTGSPGASPGTSSTGSPGSSPSASTGTGPGTPGSGTASSSPGASPGTSSTGSPGASPGTSSTGSPGASPGTSSTGSPGSSTPSGATGSPGSSTPSGATGSPGASPGTSSTGSPGTPGSGTASSSPGSSTPSGATGSPGSSTPSGATGSPGSSTPSGATGSPGSSPSASTGTGPGASPGTSSTGSPGASPGTSSTGSPGTPGSGTASSSPGASPGTSSTGSPGASPGTSSTGSPGASPGTSSTGSPGASPGTSSTGSPGTPGSGTASSSPGSSTPSGATGSPGTPGSGTASSSPGSSTPSGATGSPGTPGSGTASSSPGSSTPSGATGSPGSSTPSGATGSPGSSPSASTGTGPGSSPSASTGTGPGASPGTSSTGSPGTPGSGTASSSPGSSTPSGATGSPGSSPSASTGTGPGSSPSASTGTGPGASPGTSSTGS

SEQ ID NO: 76 - protein, 625 aa, Artificial Sequence
  Description of Artificial Sequence: Synthetic polypeptide
MAEPAGSPTSTEEGTPGSGTASSSPGSSTPSGATGSPGASPGTSSTGSPGSPAGSPTSTEEGTSESATPESGPGTSTEPSEGSAPGSPAGSPTSTEEGTSTEPSEGSAPGTSTEPSEGSAPGTSESATPESGPGSEPATSGSETPGSEPATSGSETPGSPAGSPTSTEEGTSESATPESGPGTSTEPSEGSAPGTSTEPSEGSAPGSPAGSPTSTEEGTSTEPSEGSAPGTSTEPSEGSAPGTSESATPESGPGTSTEPSEGSAPGTSESATPESGPGSEPATSGSETPGTSTEPSEGSAPGTSTEPSEGSAPGTSESATPESGPGTSESATPESGPGSPAGSPTSTEEGTSESATPESGPGSEPATSGSETPGTSESATPESGPGTSTEPSEGSAPGTSTEPSEGSAPGTSTEPSEGSAPGTSTEPSEGSAPGTSTEPSEGSAPGTSTEPSEGSAPGSPAGSPTSTEEGTSTEPSEGSAPGTSESATPESGPGSEPATSGSETPGTSESATPESGPGSEPATSGSETPGTSESATPESGPGTSTEPSEGSAPGTSESATPESGPGSPAGSPTSTEEGSPAGSPTSTEEGSPAGSPTSTEEGTSESATPESGPGTSTEPSEGSAP

SEQ ID NO: 77 - protein, 836 aa, Artificial Sequence
  Description of Artificial Sequence: Synthetic polypeptide
GSSESGSSEGGPGSSESGSSEGGPGESPGGSSGSESGSGGEPSESGSSGESPGGSSGSESGESPGGSSGSESGSSESGSSEGGPGSSESGSSEGGPGSSESGSSEGGPGESPGGSSGSESGESPGGSSGSESGESPGGSSGSESGSSESGSSEGGPGSSESGSSEGGPGSSESGSSEGGPGSSESGSSEGGPGSSESGSSEGGPGSSESGSSEGGPGSGGEPSESGSSGESPGGSSGSESGESPGGSSGSESGSGGEPSESGSSGSEGSSGPGESSGSSESGSSEGGPGSGGEPSESGSSGSEGSSGPGESSGSSESGSSEGGPGSGGEPSESGSSGESPGGSSGSESGSGGEPSESGSSGSGGEPSESGSSGSSESGSSEGGPGSGGEPSESGSSGSGGEPSESGSSGSEGSSGPGESSGESPGGSSGSESGSEGSSGPGESSGSEGSSGPGESSGSGGEPSESGSSGSSESGSSEGGPGSSESGSSEGGPGESPGGSSGSESGSGGEPSESGSSGSEGSSGPGESSGESPGGSSGSESGSEGSSGPGSSESGSSEGGPGSGGEPSESGSSGSEGSSGPGESSGSEGSSGPGESSGSEGSSGPGESSGSGGEPSESGSSGSGGEPSESGSSGESPGGSSGSESGESPGGSSGSESGSGGEPSESGSSGSEGSSGPGESSGESPGGSSGSESGSSESGSSEGGPGSSESGSSEGGPGSSESGSSEGGPGSGGEPSESGSSGSSESGSSEGGPGESPGGSSGSESGSGGEPSESGSSGSSESGSSEGGPGESPGGSSGSESGSGGEPSESGSSGESPGGSSGSESGSGGEPSESGSS

SEQ ID NO: 78 - protein, 864 aa, Artificial Sequence
  Description of Artificial Sequence: Synthetic polypeptide
GSPAGSPTSTEEGTSESATPESGPGTSTEPSEGSAPGSPAGSPTSTEEGTSTEPSEGSAPGTSTEPSEGSAPGTSESATPESGPGSEPATSGSETPGSEPATSGSETPGSPAGSPTSTEEGTSESATPESGPGTSTEPSEGSAPGTSTEPSEGSAPGSPAGSPTSTEEGTSTEPSEGSAPGTSTEPSEGSAPGTSESATPESGPGTSTEPSEGSAPGTSESATPESGPGSEPATSGSETPGTSTEPSEGSAPGTSTEPSEGSAPGTSESATPESGPGTSESATPESGPGSPAGSPTSTEEGTSESATPESGPGSEPATSGSETPGTSESATPESGPGTSTEPSEGSAPGTSTEPSEGSAPGTSTEPSEGSAPGTSTEPSEGSAPGTSTEPSEGSAPGTSTEPSEGSAPGSPAGSPTSTEEGTSTEPSEGSAPGTSESATPESGPGSEPATSGSETPGTSESATPESGPGSEPATSGSETPGTSESATPESGPGTSTEPSEGSAPGTSESATPESGPGSPAGSPTSTEEGSPAGSPTSTEEGSPAGSPTSTEEGTSESATPESGPGTSTEPSEGSAPGTSESATPESGPGSEPATSGSETPGTSESATPESGPGSEPATSGSETPGTSESATPESGPGTSTEPSEGSAPGSPAGSPTSTEEGTSESATPESGPGSEPATSGSETPGTSESATPESGPGSPAGSPTSTEEGSPAGSPTSTEEGTSTEPSEGSAPGTSESATPESGPGTSESATPESGPGTSESATPESGPGSEPATSGSETPGSEPATSGSETPGSPAGSPTSTEEGTSTEPSEGSAPGTSTEPSEGSAPGSEPATSGSETPGTSESATPESGPGTSTEPSEGSAP

SEQ ID NO: 79 - protein, 875 aa, Artificial Sequence
  Description of Artificial Sequence: Synthetic polypeptide
  MOD_RES (430)..(432): Any amino acid
  MOD_RES (443)..(446): Any amino acid
GSTSESPSGTAPGTSPSGESSTAPGSTSESPSGTAPGSTSESPSGTAPGTSTPESGSASPGTSTPESGSASPGSTSESPSGTAPGSTSESPSGTAPGTSPSGESSTAPGSTSESPSGTAPGTSPSGESSTAPGTSPSGESSTAPGSTSSTAESPGPGTSPSGESSTAPGTSPSGESSTAPGSTSSTAESPGPGTSTPESGSASPGTSTPESGSASPGSTSESPSGTAPGSTSESPSGTAPGTSTPESGSASPGSTSSTAESPGPGTSTPESGSASPGSTSESPSGTAPGTSPSGESSTAPGSTSSTAESPGPGTSPSGESSTAPGTSTPESGSASPGSTSSTAESPGPGSTSSTAESPGPGSTSSTAESPGPGSTSSTAESPGPGTSPSGESSTAPGSTSESPSGTAPGSTSESPSGTAPGTSTPESGPXXXGASASGAPSTXXXXSESPSGTAPGSTSESPSGTAPGSTSESPSGTAPGSTSESPSGTAPGSTSESPSGTAPGSTSESPSGTAPGTSTPESGSASPGTSPSGESSTAPGTSPSGESSTAPGSTSSTAESPGPGTSPSGESSTAPGTSTPESGSASPGSTSESPSGTAPGSTSESPSGTAPGTSPSGESSTAPGSTSESPSGTAPGTSTPESGSASPGTSTPESGSASPGSTSESPSGTAPGTSTPESGSASPGSTSSTAESPGPGSTSESPSGTAPGSTSESPSGTAPGTSPSGESSTAPGSTSSTAESPGPGTSPSGESSTAPGTSTPESGSASPGTSPSGESSTAPGTSPSGESSTAPGTSPSGESSTAPGSTSSTAESPGPGSTSSTAESPGPGTSPSGESSTAPGSSPSASTGTGPGSSTPSGATGSPGSSTPSGATGSP

SEQ ID NO: 80 - protein, 864 aa, Artificial Sequence
  Description of Artificial Sequence: Synthetic polypeptide
GASPGTSSTGSPGSSPSASTGTGPGSSPSASTGTGPGTPGSGTASSSPGSSTPSGATGSPGSSPSASTGTGPGASPGTSSTGSPGTPGSGTASSSPGSSTPSGATGSPGTPGSGTASSSPGASPGTSSTGSPGASPGTSSTGSPGTPGSGTASSSPGSSTPSGATGSPGASPGTSSTGSPGTPGSGTASSSPGSSTPSGATGSPGSSPSASTGTGPGSSPSASTGTGPGSSTPSGATGSPGSSTPSGATGSPGASPGTSSTGSPGASPGTSSTGSPGASPGTSSTGSPGTPGSGTASSSPGASPGTSSTGSPGASPGTSSTGSPGASPGTSSTGSPGSSPSASTGTGPGTPGSGTASSSPGASPGTSSTGSPGASPGTSSTGSPGASPGTSSTGSPGSSTPSGATGSPGSSTPSGATGSPGASPGTSSTGSPGTPGSGTASSSPGSSTPSGATGSPGSSTPSGATGSPGSSTPSGATGSPGSSPSASTGTGPGASPGTSSTGSPGASPGTSSTGSPGTPGSGTASSSPGASPGTSSTGSPGASPGTSSTGSPGASPGTSSTGSPGASPGTSSTGSPGTPGSGTASSSPGSSTPSGATGSPGTPGSGTASSSPGSSTPSGATGSPGTPGSGTASSSPGSSTPSGATGSPGSSTPSGATGSPGSSPSASTGTGPGSSPSASTGTGPGASPGTSSTGSPGTPGSGTASSSPGSSTPSGATGSPGSSPSASTGTGPGSSPSASTGTGPGASPGTSSTGSPGASPGTSSTGSPGSSTPSGATGSPGSSPSASTGTGPGASPGTSSTGSPGSSPSASTGTGPGTPGSGTASSSPGSSTPSGATGSPGSSTPSGATGSPGASPGTSSTGSP

SEQ ID NO: 81 - protein, 875 aa, Artificial Sequence
  Description of Artificial Sequence: Synthetic polypeptide
GTSTEPSEGSAPGSEPATSGSETPGSPAGSPTSTEEGSTSSTAESPGPGTSTPESGSASPGSTSESPSGTAPGSTSESPSGTAPGTSTPESGSASPGTSTPESGSASPGSEPATSGSETPGTSESATPESGPGSPAGSPTSTEEGTSTEPSEGSAPGTSESATPESGPGTSTEPSEGSAPGTSTEPSEGSAPGSPAGSPTSTEEGTSTEPSEGSAPGTSTEPSEGSAPGTSESATPESGPGTSESATPESGPGTSTEPSEGSAPGTSTEPSEGSAPGTSESATPESGPGTSTEPSEGSAPGSEPATSGSETPGSPAGSPTSTEEGSSTPSGATGSPGTPGSGTASSSPGSSTPSGATGSPGTSTEPSEGSAPGTSTEPSEGSAPGSEPATSGSETPGSPAGSPTSTEEGSPAGSPTSTEEGTSTEPSEGSAPGASASGAPSTGGTSESATPESGPGSPAGSPTSTEEGSPAGSPTSTEEGSTSSTAESPGPGSTSESPSGTAPGTSPSGESSTAPGTPGSGTASSSPGSSTPSGATGSPGSSPSASTGTGPGSEPATSGSETPGTSESATPESGPGSEPATSGSETPGSTSSTAESPGPGSTSSTAESPGPGTSPSGESSTAPGSEPATSGSETPGSEPATSGSETPGTSTEPSEGSAPGSTSSTAESPGPGTSTPESGSASPGSTSESPSGTAPGTSTEPSEGSAPGTSTEPSEGSAPGTSTEPSEGSAPGSSTPSGATGSPGSSPSASTGTGPGASPGTSSTGSPGSEPATSGSETPGTSESATPESGPGSPAGSPTSTEEGSSTPSGATGSPGSSPSASTGTGPGASPGTSSTGSPGTSESATPESGPGTSTEPSEGSAPGTSTEPSEGSAP

SEQ ID NO: 82 - protein, 913 aa, Artificial Sequence
  Description of Artificial Sequence: Synthetic polypeptide
MAEPAGSPTSTEEGTPGSGTASSSPGSSTPSGATGSPGASPGTSSTGSPGSPAGSPTSTEEGTSESATPESGPGTSTEPSEGSAPGSPAGSPTSTEEGTSTEPSEGSAPGTSTEPSEGSAPGTSESATPESGPGSEPATSGSETPGSEPATSGSETPGSPAGSPTSTEEGTSESATPESGPGTSTEPSEGSAPGTSTEPSEGSAPGSPAGSPTSTEEGTSTEPSEGSAPGTSTEPSEGSAPGTSESATPESGPGTSTEPSEGSAPGTSESATPESGPGSEPATSGSETPGTSTEPSEGSAPGTSTEPSEGSAPGTSESATPESGPGTSESATPESGPGSPAGSPTSTEEGTSESATPESGPGSEPATSGSETPGTSESATPESGPGTSTEPSEGSAPGTSTEPSEGSAPGTSTEPSEGSAPGTSTEPSEGSAPGTSTEPSEGSAPGTSTEPSEGSAPGSPAGSPTSTEEGTSTEPSEGSAPGTSESATPESGPGSEPATSGSETPGTSESATPESGPGSEPATSGSETPGTSESATPESGPGTSTEPSEGSAPGTSESATPESGPGSPAGSPTSTEEGSPAGSPTSTEEGSPAGSPTSTEEGTSESATPESGPGTSTEPSEGSAPGTSESATPESGPGSEPATSGSETPGTSESATPESGPGSEPATSGSETPGTSESATPESGPGTSTEPSEGSAPGSPAGSPTSTEEGTSESATPESGPGSEPATSGSETPGTSESATPESGPGSPAGSPTSTEEGSPAGSPTSTEEGTSTEPSEGSAPGTSESATPESGPGTSESATPESGPGTSESATPESGPGSEPATSGSETPGSEPATSGSETPGSPAGSPTSTEEGTSTEPSEGSAPGTSTEPSEGSAPGSEPATSGSETPGTSESATPESGPGTSTEPSEGSAP

SEQ ID NO: 83 - protein, 924 aa, Artificial Sequence
  Description of Artificial Sequence: Synthetic polypeptide
MAEPAGSPTSTEEGASPGTSSTGSPGSSTPSGATGSPGSSTPSGATGSPGTSTEPSEGSAPGSEPATSGSETPGSPAGSPTSTEEGSTSSTAESPGPGTSTPESGSASPGSTSESPSGTAPGSTSESPSGTAPGTSTPESGSASPGTSTPESGSASPGSEPATSGSETPGTSESATPESGPGSPAGSPTSTEEGTSTEPSEGSAPGTSESATPESGPGTSTEPSEGSAPGTSTEPSEGSAPGSPAGSPTSTEEGTSTEPSEGSAPGTSTEPSEGSAPGTSESATPESGPGTSESATPESGPGTSTEPSEGSAPGTSTEPSEGSAPGTSESATPESGPGTSTEPSEGSAPGSEPATSGSETPGSPAGSPTSTEEGSSTPSGATGSPGTPGSGTASSSPGSSTPSGATGSPGTSTEPSEGSAPGTSTEPSEGSAPGSEPATSGSETPGSPAGSPTSTEEGSPAGSPTSTEEGTSTEPSEGSAPGASASGAPSTGGTSESATPESGPGSPAGSPTSTEEGSPAGSPTSTEEGSTSSTAESPGPGSTSESPSGTAPGTSPSGESSTAPGTPGSGTASSSPGSSTPSGATGSPGSSPSASTGTGPGSEPATSGSETPGTSESATPESGPGSEPATSGSETPGSTSSTAESPGPGSTSSTAESPGPGTSPSGESSTAPGSEPATSGSETPGSEPATSGSETPGTSTEPSEGSAPGSTSSTAESPGPGTSTPESGSASPGSTSESPSGTAPGTSTEPSEGSAPGTSTEPSEGSAPGTSTEPSEGSAPGSSTPSGATGSPGSSPSASTGTGPGASPGTSSTGSPGSEPATSGSETPGTSESATPESGPGSPAGSPTSTEEGSSTPSGATGSPGSSPSASTGTGPGASPGTSSTGSPGTSESATPESGPGTSTEPSEGSAPGTSTEPSEGSAP

SEQ ID NO: 84 - protein, 1318 aa, Artificial Sequence
  Description of Artificial Sequence: Synthetic polypeptide
GTSTEPSEGSAPGSEPATSGSETPGSPAGSPTSTEEGSTSSTAESPGPGTSTPESGSASPGSTSESPSGTAPGSTSESPSGTAPGTSTPESGSASPGTSTPESGSASPGSEPATSGSETPGTSESATPESGPGSPAGSPTSTEEGTSTEPSEGSAPGTSESATPESGPGTSTEPSEGSAPGTSTEPSEGSAPGSPAGSPTSTEEGTSTEPSEGSAPGTSTEPSEGSAPGTSESATPESGPGTSESATPESGPGTSTEPSEGSAPGTSTEPSEGSAPGTSESATPESGPGTSTEPSEGSAPGSEPATSGSETPGSPAGSPTSTEEGSSTPSGATGSPGTPGSGTASSSPGSSTPSGATGSPGTSTEPSEGSAPGTSTEPSEGSAPGSEPATSGSETPGSPAGSPTSTEEGSPAGSPTSTEEGTSTEPSEGSAPGPEPTGPAPSGGSEPATSGSETPGTSESATPESGPGSPAGSPTSTEEGTSESATPESGPGSPAGSPTSTEEGSPAGSPTSTEEGTSESATPESGPGSPAGSPTSTEEGSPAGSPTSTEEGSTSSTAESPGPGSTSESPSGTAPGTSPSGESSTAPGSTSESPSGTAPGSTSESPSGTAPGTSPSGESSTAPGTSTEPSEGSAPGTSESATPESGPGTSESATPESGPGSEPATSGSETPGTSESATPESGPGTSESATPESGPGTSTEPSEGSAPGTSESATPESGPGTSTEPSEGSAPGTSPSGESSTAPGTSPSGESSTAPGTSPSGESSTAPGTSTEPSEGSAPGSPAGSPTSTEEGTSTEPSEGSAPGSSPSASTGTGPGSSTPSGATGSPGSSTPSGATGSPGSSTPSGATGSPGSSTPSGATGSPGASPGTSSTGSPGASASGAPSTGGTSPSGESSTAPGSTSSTAESPGPGTSPSGESSTAPGTSESATPESGPGTSTEPSEGSAPGTSTEPSEGSAPGSSPSASTGTGPGSSTPSGATGSPGASPGTSSTGSPGTSTPESGSASPGTSPSGESSTAPGTSPSGESSTAPGTSESATPESGPGSEPATSGSETPGTSTEPSEGSAPGSTSESPSGTAPGSTSESPSGTAPGTSTPESGSASPGSPAGSPTSTEEGTSESATPESGPGTSTEPSEGSAPGSPAGSPTSTEEGTSESATPESGPGSEPATSGSETPGSSTPSGATGSPGASPGTSSTGSPGSSTPSGATGSPGSTSESPSGTAPGTSPSGESSTAPGSTSSTAESPGPGSSTPSGATGSPGASPGTSSTGSPGTPGSGTASSSPGSPAGSPTSTEEGSPAGSPTSTEEGTSTEPSEGSAP

SEQ ID NO: 85 - protein, 864 aa, Artificial Sequence
  Description of Artificial Sequence: Synthetic polypeptide
GTSTEPSEPGSAGTSTEPSEPGSAGSEPATSGTEPSGSGASEPTSTEPGSEPATSGTEPSGSEPATSGTEPSGSEPATSGTEPSGSGASEPTSTEPGTSTEPSEPGSAGSEPATSGTEPSGTSTEPSEPGSAGSEPATSGTEPSGSEPATSGTEPSGTSTEPSEPGSAGTSTEPSEPGSAGSEPATSGTEPSGSEPATSGTEPSGTSEPSTSEPGAGSGASEPTSTEPGTSEPSTSEPGAGSEPATSGTEPSGSEPATSGTEPSGTSTEPSEPGSAGTSTEPSEPGSAGSGASEPTSTEPGSEPATSGTEPSGSEPATSGTEPSGSEPATSGTEPSGSEPATSGTEPSGTSTEPSEPGSAGSEPATSGTEPSGSGASEPTSTEPGTSTEPSEPGSAGSEPATSGTEPSGSGASEPTSTEPGTSTEPSEPGSAGSGASEPTSTEPGSEPATSGTEPSGSGASEPTSTEPGSEPATSGTEPSGSGASEPTSTEPGTSTEPSEPGSAGSEPATSGTEPSGSGASEPTSTEPGTSTEPSEPGSAGSEPATSGTEPSGTSTEPSEPGSAGSEPATSGTEPSGTSTEPSEPGSAGTSTEPSEPGSAGTSTEPSEPGSAGTSTEPSEPGSAGTSTEPSEPGSAGTSTEPSEPGSAGTSEPSTSEPGAGSGASEPTSTEPGTSTEPSEPGSAGTSTEPSEPGSAGTSTEPSEPGSAGSEPATSGTEPSGSGASEPTSTEPGSEPATSGTEPSGSEPATSGTEPSGSEPATSGTEPSGSEPATSGTEPSGTSEPSTSEPGAGSEPATSGTEPSGSGASEPTSTEPGTSTEPSEPGSAGSEPATSGTEPSGSGASEPTSTEPGTSTEPSEPGSA

SEQ ID NO: 86 - protein, 864 aa, Artificial Sequence
  Description of Artificial Sequence: Synthetic polypeptide
GSETATSGSETAGTSESATSESGAGSTAGSETSTEAGTSESATSESGAGSETATSGSETAGSETATSGSETAGTSTEASEGSASGTSTEASEGSASGTSESATSESGAGSETATSGSETAGTSTEASEGSASGSTAGSETSTEAGTSESATSESGAGTSESATSESGAGSETATSGSETAGTSESATSESGAGTSTEASEGSASGSETATSGSETAGSETATSGSETAGTSTEASEGSASGSTAGSETSTEAGTSESATSESGAGTSTEASEGSASGSETATSGSETAGSTAGSETSTEAGSTAGSETSTEAGSETATSGSETAGTSESATSESGAGTSESATSESGAGSETATSGSETAGTSESATSESGAGTSESATSESGAGSETATSGSETAGSETATSGSETAGTSTEASEGSASGSTAGSETSTEAGSETATSGSETAGTSESATSESGAGSTAGSETSTEAGSTAGSETSTEAGSTAGSETSTEAGTSTEASEGSASGSTAGSETSTEAGSTAGSETSTEAGTSTEASEGSASGSTAGSETSTEAGSETATSGSETAGTSTEASEGSASGTSESATSESGAGSETATSGSETAGTSESATSESGAGTSESATSESGAGSETATSGSETAGTSESATSESGAGSETATSGSETAGTSTEASEGSASGTSTEASEGSASGSTAGSETSTEAGSTAGSETSTEAGSETATSGSETAGTSESATSESGAGTSESATSESGAGSETATSGSETAGSETATSGSETAGSETATSGSETAGTSTEASEGSASGTSESATSESGAGSETATSGSETAGSETATSGSETAGTSESATSESGAGTSESATSESGAGSETATSGSETA

SEQ ID NO: 87 - protein, 948 aa, Artificial Sequence
  Description of Artificial Sequence: Synthetic polypeptide
GTSTEPSEGSAPGTSESATPESGPGSEPATSGSETPGTSESATPESGPGTSTEPSEGSAPGSPAGSPTSTEEGTSTEPSEGSAPGSEPATSGSETPGTSESATPESGPGTSESATPESGPGSEPATSGSETPGTSTEPSEGSAPGTSESATPESGPGTSTEPSEGSAPGTSTEPSEGSAPGSEPATSGSETPGTSTEPSEGSAPGSEPATSGSETPGSEPATSGSETPGTSTEPSEGSAPGSEPATSGSETPGSEPATSGSETPGTSTEPSEGSAPGSEPATSGSETPGSPAGSPTSTEEGTSESATPESGPGTSTEPSEGSAPGSEPATSGSETPGTSESATPESGPGSEPATSGSETPGSEPATSGSETPGTSESATPESGPGSPAGSPTSTEEGTSESATPESGPGSPAGSPTSTEEGTSTEPSEGSAPGTSESATPESGPGTSTEPSEGSAPGTSTEPSEGSAPGSPAGSPTSTEEGTSTEPSEGSAPGTSESATPESGPGSPAGSPTSTEEGSPAGSPTSTEEGTSESATPESGPGTSESATPESGPGTSTEPSEGSAPGSPAGSPTSTEEGTSESATPESGPGTSTEPSEGSAPGSEPATSGSETPGSPAGSPTSTEEGTSESATPESGPGTSTEPSEGSAPGSEPATSGSETPGSEPATSGSETPGSEPATSGSETPGSPAGSPTSTEEGTSESATPESGPGSEPATSGSETPGSEPATSGSETPGSPAGSPTSTEEGSPAGSPTSTEEGSPAGSPTSTEEGTSESATPESGPGSEPATSGSETPGTSTEPSEGSAPGTSTEPSEGSAPGSPAGSPTSTEEGSPAGSPTSTEEGSPAGSPTSTEEGTSTEPSEGSAPGTSESATPESGPGTSESATPESGPGTSTEPSEGSAPGTSTEPSEGSAPGTSTEPSEGSAPGTSESATPESGPGTSESATPESGP

SEQ ID NO: 88 - protein, 1024 aa, Artificial Sequence
  Description of Artificial Sequence: Synthetic polypeptide
GSEPATSGSETPGSEPATSGSETPGTSTEPSEGSAPGTSESATPESGPGSPAGSPTSTEEGTSTEPSEGSAPGTSESATPESGPGTSESATPESGPGSEPATSGSETPGSEPATSGSETPGTSESATPESGPGTSESATPESGPGSPAGSPTSTEEGTSTEPSEGSAPGSEPATSGSETPGTSTEPSEGSAPGSPAGSPTSTEEGSPAGSPTSTEEGSPAGSPTSTEEGTSTEPSEGSAPGTSESATPESGPGSEPATSGSETPGTSESATPESGPGTSESATPESGPGSPAGSPTSTEEGTSTEPSEGSAPGSEPATSGSETPGTSTEPSEGSAPGTSESATPESGPGSPAGSPTSTEEGTSTEPSEGSAPGTSTEPSEGSAPGSPAGSPTSTEEGTSTEPSEGSAPGTSESATPESGPGSPAGSPTSTEEGTSESATPESGPGSEPATSGSETPGTSTEPSEGSAPGSEPATSGSETPGTSESATPESGPGTSTEPSEGSAPGTSESATPESGPGTSTEPSEGSAPGTSTEPSEGSAPGSEPATSGSETPGSPAGSPTSTEEGTSESATPESGPGTSTEPSEGSAPGSPAGSPTSTEEGTSTEPSEGSAPGTSESATPESGPGTSTEPSEGSAPGSEPATSGSETPGSEPATSGSETPGTSESATPESGPGTSESATPESGPGTSESATPESGPGTSTEPSEGSAPGTSTEPSEGSAPGSPAGSPTSTEEGSPAGSPTSTEEGTSESATPESGPGSPAGSPTSTEEGSPAGSPTSTEEGTSESATPESGPGSEPATSGSETPGTSTEPSEGSAPGSEPATSGSETPGSPAGSPTSTEEGTSESATPESGPGTSESATPESGPGSEPATSGSETPGTSTEPSEGSAPGTSTEPSEGSAPGSPAGSPTSTEEGTSTEPSEGSAPGTSTEPSEGSAPGSEPATSGSETPGSPAGSPTSTEEGTSESATPESGPGTSTEPSEGSAPGSPAGSPTSTEEGTSESATPESGPGTSESATPESGPGTST

SEQ ID NO: 89 - protein, 1024 aa, Artificial Sequence
  Description of Artificial Sequence: Synthetic polypeptide
GSEPATSGSETPGSEPATSGSETPGTSTEPSEGSAPGSEPATSGSETPGTSESATPESGPGSEPATSGSETPGSPAGSPTSTEEGTSESATPESGPGSEPATSGSETPGTSTEPSEGSAPGTSESATPESGPGTSESATPESGPGTSTEPSEGSAPGTSTEPSEGSAPGSEPATSGSETPGSPAGSPTSTEEGTSTEPSEGSAPGSEPATSGSETPGSPAGSPTSTEEGTSTEPSEGSAPGTSESATPESGPGSPAGSPTSTEEGTSTEPSEGSAPGTSESATPESGPGSEPATSGSETPGTSESATPESGPGSEPATSGSETPGTSTEPSEGSAPGTSTEPSEGSAPGTSTEPSEGSAPGSPAGSPTSTEEGSPAGSPTSTEEGTSESATPESGPGTSTEPSEGSAPGTSTEPSEGSAPGSPAGSPTSTEEGSPAGSPTSTEEGSPAGSPTSTEEGTSESATPESGPGSEPATSGSETPGTSESATPESGPGSPAGSPTSTEEGTSTEPSEGSAPGTSESATPESGPGSEPATSGSETPGSPAGSPTSTEEGTSTEPSEGSAPGTSESATPESGPGTSESATPESGPGSPAGSPTSTEEGTSTEPSEGSAPGSPAGSPTSTEEGSPAGSPTSTEEGTSESATPESGPGSEPATSGSETPGTSTEPSEGSAPGSEPATSGSETPGTSESATPESGPGTSTEPSEGSAPGTSESATPESGPGTSESATPESGPGTSTEPSEGSAPGTSTEPSEGSAPGSEPATSGSETPGTSESATPESGPGTSTEPSEGSAPGSEPATSGSETPGSPAGSPTSTEEGTSESATPESGPGSPAGSPTSTEEGTSTEPSEGSAPGSEPATSGSETPGSEPATSGSETPGSEPATSGSETPGTSESATPESGPGTSESATPESGPGTSTEPSEGSAPGTSTEPSEGSAPGSEPATSGSETPGTSTEPSEGSAPGTSESATPESGPGSPAGSPTSTEEGSPAGSPTSTEEGTSTEPSEGSAPGSPAGSPTSTEEGSPA

SEQ ID NO: 90 - protein, 1024 aa, Artificial Sequence
  Description of Artificial Sequence: Synthetic polypeptide
GSPAGSPTSTEEGTSTEPSEGSAPGSPAGSPTSTEEGTSESATPESGPGSEPATSGSETPGTSTEPSEGSAPGTSTEPSEGSAPGTSESATPESGPGTSTEPSEGSAPGTSTEPSEGSAPGSEPATSGSETPGSPAGSPTSTEEGTSESATPESGPGSPAGSPTSTEEGTSTEPSEGSAPGSPAGSPTSTEEGTSTEPSEGSAPGSPAGSPTSTEEGTSTEPSEGSAPGSPAGSPTSTEEGSPAGSPTSTEEGTSTEPSEGSAPGSEPATSGSETPGSPAGSPTSTEEGTSESATPESGPGSEPATSGSETPGSEPATSGSETPGTSESATPESGPGSPAGSPTSTEEGTSESATPESGPGSEPATSGSETPGSEPATSGSETPGTSESATPESGPGTSESATPESGPGTSTEPSEGSAPGTSTEPSEGSAPGTSESATPESGPGSPAGSPTSTEEGTSTEPSEGSAPGSEPATSGSETPGSPAGSPTSTEEGTSTEPSEGSAPGTSTEPSEGSAPGSPAGSPTSTEEGSPAGSPTSTEEGSPAGSPTSTEEGTSESATPESGPGSEPATSGSETPGTSESATPESGPGTSESATPESGPGTSTEPSEGSAPGTSESATPESGPGSPAGSPTSTEEGTSESATPESGPGTSESATPESGPGTSTEPSEGSAPGSEPATSGSETPGTSTEPSEGSAPGSPAGSPTSTEEGTSESATPESGPGTSTEPSEGSAPGTSTEPSEGSAPGSEPATSGSETPGSEPATSGSETPGTSESATPESGPGSEPATSGSETPGSPAGSPTSTEEGTSESATPESGPGSEPATSGSETPGTSTEPSEGSAPGTSESATPESGPGTSESATPESGPGTSTEPSEGSAPGSEPATSGSETPGTSTEPSEGSAPGSPAGSPTSTEEGSPAGSPTSTEEGTSESATPESGPGSEPATSGSETPGSPAGSPTSTEEGSPAGSPTSTEEGTSESATPESGPGSEPATSGSETPGTSTEPSEGSAPGTSTEPSEGSAPGSEP

SEQ ID NO: 91 - protein, 1024 aa, Artificial Sequence
  Description of Artificial Sequence: Synthetic polypeptide
GSPAGSPTSTEEGTSTEPSEGSAPGTSESATPESGPGTSESATPESGPGSEPATSGSETPGTSTEPSEGSAPGTSESATPESGPGSPAGSPTSTEEGTSTEPSEGSAPGTSESATPESGPGSPAGSPTSTEEGTSTEPSEGSAPGTSESATPESGPGTSTEPSEGSAPGSEPATSGSETPGSEPATSGSETPGSEPATSGSETPGTSESATPESGPGSPAGSPTSTEEGTSESATPESGPGSEPATSGSETPGTSESATPESGPGTSESATPESGPGSPAGSPTSTEEGTSTEPSEGSAPGTSESATPESGPGTSTEPSEGSAPGTSTEPSEGSAPGTSTEPSEGSAPGSEPATSGSETPGTSTEPSEGSAPGTSESATPESGPGTSESATPESGPGTSTEPSEGSAPGTSESATPESGPGTSESATPESGPGSEPATSGSETPGTSTEPSEGSAPGTSESATPESGPGSPAGSPTSTEEGSPAGSPTSTEEGTSTEPSEGSAPGSEPATSGSETPGSEPATSGSETPGTSTEPSEGSAPGSEPATSGSETPGSPAGSPTSTEEGTSESATPESGPGSEPATSGSETPGSEPATSGSETPGTSESATPESGPGTSESATPESGPGTSTEPSEGSAPGSPAGSPTSTEEGTSESATPESGPGTSTEPSEGSAPGSEPATSGSETPGSPAGSPTSTEEGTSTEPSEGSAPGTSTEPSEGSAPGSEPATSGSETPGTSESATPESGPGTSTEPSEGSAPGSPAGSPTSTEEGTSESATPESGPGTSESATPESGPGTSTEPSEGSAPGSEPATSGSETPGSEPATSGSETPGTSTEPSEGSAPGTSESATPESGPGSPAGSPTSTEEGTSTEPSEGSAPGTSTEPSEGSAPGSPAGSPTSTEEGSPAGSPTSTEEGTSTEPSEGSAPGSEPATSGSETPGSPAGSPTSTEEGTSESATPESGPGSEPATSGSETPGSEPATSGSETPGTSESATPESGPGTSESATPESGPGTSTEPSEGSAPGTST

SEQ ID NO: 92 - protein, 1024 aa, Artificial Sequence
  Description of Artificial Sequence: Synthetic polypeptide
GSEPATSGSETPGSPAGSPTSTEEGTSTEPSEGSAPGSEPATSGSETPGTSESATPESGPGTSTEPSEGSAPGTSESATPESGPGSPAGSPTSTEEGTSTEPSEGSAPGTSTEPSEGSAPGSPAGSPTSTEEGTSTEPSEGSAPGTSESATPESGPGSEPATSGSETPGTSESATPESGPGSEPATSGSETPGTSTEPSEGSAPGTSTEPSEGSAPGSEPATSGSETPGTSTEPSEGSAPGTSTEPSEGSAPGSPAGSPTSTEEGTSTEPSEGSAPGTSESATPESGPGTSESATPESGPGTSTEPSEGSAPGTSTEPSEGSAPGSPAGSPTSTEEGSPAGSPTSTEEGTSTEPSEGSAPGSEPATSGSETPGSPAGSPTSTEEGTSTEPSEGSAPGSPAGSPTSTEEGSPAGSPTSTEEGTSESATPESGPGSEPATSGSETPGSEPATSGSETPGTSTEPSEGSAPGSPAGSPTSTEEGSPAGSPTSTEEGTSESATPESGPGSEPATSGSETPGSEPATSGSETPGTSESATPESGPGSEPATSGSETPGSEPATSGSETPGTSESATPESGPGTSESATPESGPGTSESATPESGPGTSESATPESGPGSPAGSPTSTEEGTSTEPSEGSAPGTSESATPESGPGTSTEPSEGSAPGTSTEPSEGSAPGTSESATPESGPGTSTEPSEGSAPGTSESATPESGPGSPAGSPTSTEEGTSTEPSEGSAPGSEPATSGSETPGTSTEPSEGSAPGSEPATSGSETPGTSTEPSEGSAPGTSTEPSEGSAPGSPAGSPTSTEEGTSESATPESGPGTSTEPSEGSAPGSEPATSGSETPGTSESATPESGPGTSESATPESGPGTSESATPESGPGTSTEPSEGSAPGSEPATSGSETPGSPAGSPTSTEEGTSESATPESGPGTSTEPSEGSAPGTSTEPSEGSAPGSPAGSPTSTEEGTSESATPESGPGTSTEPSEGSAPGTSTEPSEGSAPGSPAGSPTSTEEGTSESATPESGPGSPA

SEQ ID NO: 93 - protein, 1024 aa, Artificial Sequence
  Description of Artificial Sequence: Synthetic polypeptide
GTSTEPSEGSAPGTSTEPSEGSAPGTSTEPSEGSAPGTSTEPSEGSAPGSPAGSPTSTEEGSPAGSPTSTEEGTSESATPESGPGSEPATSGSETPGTSTEPSEGSAPGTSESATPESGPGTSTEPSEGSAPGTSESATPESGPGTSESATPESGPGSPAGSPTSTEEGTSTEPSEGSAPGSEPATSGSETPGTSTEPSEGSAPGSPAGSPTSTEEGTSTEPSEGSAPGSPAGSPTSTEEGSPAGSPTSTEEGSPAGSPTSTEEGTSESATPESGPGSEPATSGSETPGTSESATPESGPGTSESATPESGPGSPAGSPTSTEEGTSTEPSEGSAPGSEPATSGSETPGTSTEPSEGSAPGSPAGSPTSTEEGSPAGSPTSTEEGTSTEPSEGSAPGSEPATSGSETPGSPAGSPTSTEEGTSESATPESGPGSEPATSGSETPGSPAGSPTSTEEGTSESATPESGPGTSESATPESGPGTSTEPSEGSAPGSEPATSGSETPGSEPATSGSETPGTSESATPESGPGSEPATSGSETPGTSTEPSEGSAPGSPAGSPTSTEEGTSTEPSEGSAPGSEPATSGSETPGSEPATSGSETPGSPAGSPTSTEEGTSESATPESGPGTSTEPSEGSAPGSPAGSPTSTEEGSPAGSPTSTEEGTSESATPESGPGSPAGSPTSTEEGTSTEPSEGSAPGSEPATSGSETPGSEPATSGSETPGSEPATSGSETPGTSESATPESGPGTSESATPESGPGTSTEPSEGSAPGTSTEPSEGSAPGSEPATSGSETPGTSTEPSEGSAPGTSESATPESGPGSPAGSPTSTEEGSPAGSPTSTEEGTSTEPSEGSAPGTSESATPESGPGSPAGSPTSTEEGTSTEPSEGSAPGSEPATSGSETPGTSESATPESGPGSEPATSGSETPGTSESATPESGPGSEPATSGSETPGSEPATSGSETPGTSTEPSEGSAPGTSESATPESGPGTSTEPSEGSAPGTSTEPSEGSAPGTSESATPESGPGSPA

SEQ ID NO: 94 - protein, 1024 aa, Artificial Sequence
  Description of Artificial Sequence: Synthetic polypeptide
GSEPATSGSETPGTSTEPSEGSAPGSEPATSGSETPGTSTEPSEGSAPGTSESATPESGPGTSESATPESGPGSEPATSGSETPGTSTEPSEGSAPGTSTEPSEGSAPGTSESATPESGPGTSTEPSEGSAPGTSTEPSEGSAPGSEPATSGSETPGSPAGSPTSTEEGTSESATPESGPGTSESATPESGPGTSTEPSEGSAPGTSESATPESGPGSEPATSGSETPGTSESATPESGPGTSESATPESGPGTSTEPSEGSAPGTSTEPSEGSAPGSEPATSGSETPGSPAGSPTSTEEGTSESATPESGPGSEPATSGSETPGSEPATSGSETPGTSESATPESGPGTSESATPESGPGSPAGSPTSTEEGTSTEPSEGSAPGTSESATPESGPGTSTEPSEGSAPGTSTEPSEGSAPGTSESATPESGPGTSTEPSEGSAPGSPAGSPTSTEEGSPAGSPTSTEEGTSESATPESGPGSEPATSGSETPGSEPATSGSETPGTSTEPSEGSAPGTSESATPESGPGSPAGSPTSTEEGSPAGSPTSTEEGTSTEPSEGSAPGSPAGSPTSTEEGSPAGSPTSTEEGTSESATPESGPGSEPATSGSETPGTSTEPSEGSAPGTSTEPSEGSAPGSEPATSGSETPGSPAGSPTSTEEGTSESATPESGPGSPAGSPTSTEEGTSTEPSEGSAPGTSESATPESGPGSEPATSGSETPGTSESATPESGPGTSESATPESGPGSPAGSPTSTEEGTSTEPSEGSAPGSEPATSGSETPGSPAGSPTSTEEGTSTEPSEGSAPGSEPATSGSETPGSEPATSGSETPGTSESATPESGPGTSESATPESGPGTSTEPSEGSAPGTSESATPESGPGSEPATSGSETPGTSESATPESGPGTSESATPESGPGTSTEPSEGSAPGTSESATPESGPGSEPATSGSETPGTSTEPSEGSAPGSPAGSPTSTEEGTSESATPESGPGTSTEPSEGSAPGTSTEPSEGSAPGSPAGSPTSTEEGTST

SEQ ID NO: 95 - protein, 1024 aa, Artificial Sequence
  Description of Artificial Sequence: Synthetic polypeptide
GTSESATPESGPGTSTEPSEGSAPGTSESATPESGPGTSTEPSEGSAPGSEPATSGSETPGSPAGSPTSTEEGTSESATPESGPGSEPATSGSETPGSEPATSGSETPGTSESATPESGPGTSESATPESGPGTSTEPSEGSAPGSEPATSGSETPGSEPATSGSETPGTSESATPESGPGTSESATPESGPGSEPATSGSETPGTSESATPESGPGSPAGSPTSTEEGSPAGSPTSTEEGTSTEPSEGSAPGSEPATSGSETPGSPAGSPTSTEEGTSESATPESGPGSPAGSPTSTEEGTSTEPSEGSAPGSEPATSGSETPGSPAGSPTSTEEGTSESATPESGPGSPAGSPTSTEEGSPAGSPTSTEEGTSTEPSEGSAPGSEPATSGSETPGSPAGSPTSTEEGTSESATPESGPGTSTEPSEGSAPGSPAGSPTSTEEGTSESATPESGPGSEPATSGSETPGTSTEPSEGSAPGSPAGSPTSTEEGTSTEPSEGSAPGTSESATPESGPGTSESATPESGPGTSTEPSEGSAPGTSTEPSEGSAPGSEPATSGSETPGTSESATPESGPGTSESATPESGPGTSTEPSEGSAPGTSTEPSEGSAPGSPAGSPTSTEEGSPAGSPTSTEEGTSTEPSEGSAPGSEPATSGSETPGSEPATSGSETPGTSESATPESGPGSPAGSPTSTEEGTSESATPESGPGTSTEPSEGSAPGTSTEPSEGSAPGSPAGSPTSTEEGSPAGSPTSTEEGTSESATPESGPGSPAGSPTSTEEGTSTEPSEGSAPGSEPATSGSETPGSPAGSPTSTEEGSPAGSPTSTEEGTSTEPSEGSAPGTSESATPESGPGTSESATPESGPGSPAGSPTSTEEGTSTEPSEGSAPGSPAGSPTSTEEGTSTEPSEGSAPGSPAGSPTSTEEGTSTEPSEGSAPGTSTEPSEGSAPGSEPATSGSETPGSPAGSPTSTEEGTSESATPESGPGSEPATSGSETPGSPAGSPTSTEEGTSESATPESGPGTSE

SEQ ID NO: 96 - protein, 1024 aa, Artificial Sequence
  Description of Artificial Sequence: Synthetic polypeptide
GTSESATPESGPGSPAGSPTSTEEGSPAGSPTSTEEGTSESATPESGPGSEPATSGSETPGTSTEPSEGSAPGTSTEPSEGSAPGTSTEPSEGSAPGSPAGSPTSTEEGTSTEPSEGSAPGTSESATPESGPGTSESATPESGPGSPAGSPTSTEEGSPAGSPTSTEEGSPAGSPTSTEEGTSESATPESGPGSEPATSGSETPGTSESATPESGPGTSTEPSEGSAPGTSESATPESGPGTSTEPSEGSAPGTSTEPSEGSAPGTSESATPESGPGSPAGSPTSTEEGTSESATPESGPGTSTEPSEGSAPGSPAGSPTSTEEGTSESATPESGPGSEPATSGSETPGTSTEPSEGSAPGSEPATSGSETPGSEPATSGSETPGTSESATPESGPGTSESATPESGPGTSTEPSEGSAPGTSESATPESGPGSPAGSPTSTEEGTSTEPSEGSAPGSEPATSGSETPGTSESATPESGPGSEPATSGSETPGTSTEPSEGSAPGTSESATPESGPGSPAGSPTSTEEGSPAGSPTSTEEGSPAGSPTSTEEGTSESATPESGPGSEPATSGSETPGTSESATPESGPGTSESATPESGPGSEPATSGSETPGTSTEPSEGSAPGTSTEPSEGSAPGTSTEPSEGSAPGTSESATPESGPGSEPATSGSETPGTSESATPESGPGSEPATSGSETPGTSTEPSEGSAPGSEPATSGSETPGSPAGSPTSTEEGTSESATPESGPGTSESATPESGPGTSESATPESGPGSPAGSPTSTEEGTSTEPSEGSAPGTSESATPESGPGTSESATPESGPGTSTEPSEGSAPGTSTEPSEGSAPGSPAGSPTSTEEGTSESATPESGPGSEPATSGSETPGTSESATPESGPGTSESATPESGPGTSTEPSEGSAPGSEPATSGSETPGTSESATPESGPGSPAGSPTSTEEGTSTEPSEGSAPGSEPATSGSETPGSPAGSPTSTEEGTSESATPESGPGSPAGSPTSTEEGTSTEPSEGSAPGSEP

SEQ ID NO: 97 - protein, 1024 aa, Artificial Sequence
  Description of Artificial Sequence: Synthetic polypeptide
GSEPATSGSETPGTSTEPSEGSAPGTSESATPESGPGSEPATSGSETPGTSTEPSEGSAPGSPAGSPTSTEEGTSESATPESGPGSPAGSPTSTEEGTSTEPSEGSAPGSEPATSGSETPGTSTEPSEGSAPGTSESATPESGPGSEPATSGSETPGSEPATSGSETPGTSESATPESGPGTSTEPSEGSAPGTSESATPESGPGTSESATPESGPGSPAGSPTSTEEGSPAGSPTSTEEGTSESATPESGPGTSESATPESGPGTSTEPSEGSAPGTSTEPSEGSAPGSPAGSPTSTEEGTSTEPSEGSAPGSEPATSGSETPGSEPATSGSETPGSEPATSGSETPGSEPATSGSETPGTSESATPESGPGTSESATPESGPGTSESATPESGPGTSTEPSEGSAPGTSESATPESGPGTSESATPESGPGTSTEPSEGSAPGSPAGSPTSTEEGTSTEPSEGSAPGSEPATSGSETPGSPAGSPTSTEEGTSESATPESGPGTSTEPSEGSAPGSEPATSGSETPGTSESATPESGPGTSESATPESGPGTSTEPSEGSAPGSEPATSGSETPGSPAGSPTSTEEGTSESATPESGPGTSESATPESGPGTSTEPSEGSAPGSEPATSGSETPGSPAGSPTSTEEGTSESATPESGPGSEPATSGSETPGTSTEPSEGSAPGSEPATSGSETPGSPAGSPTSTEEGTSESATPESGPGTSTEPSEGSAPGSEPATSGSETPGTSESATPESGPGTSESATPESGPGSPAGSPTSTEEGTSTEPSEGSAPGSPAGSPTSTEEGSPAGSPTSTEEGSPAGSPTSTEEGTSESATPESGPGSEPATSGSETPGTSTEPSEGSAPGTSTEPSEGSAPGTSESATPESGPGTSTEPSEGSAPGTSESATPESGPGSEPATSGSETPGTSTEPSEGSAPGTSESATPESGPGSPAGSPTSTEEGSPAGSPTSTEEGSPAGSPTSTEEGTSESATPESGPGSPAGSPTSTEEGTSESATPESGPGSEP

SEQ ID NO: 98 - protein, 1024 aa, Artificial Sequence
  Description of Artificial Sequence: Synthetic polypeptide
GTSTEPSEGSAPGSEPATSGSETPGTSTEPSEGSAPGTSTEPSEGSAPGSEPATSGSETPGSPAGSPTSTEEGSPAGSPTSTEEGTSESATPESGPGSEPATSGSETPGTSTEPSEGSAPGTSTEPSEGSAPGSPAGSPTSTEEGTSESATPESGPGTSESATPESGPGSPAGSPTSTEEGTSTEPSEGSAPGTSESATPESGPGTSTEPSEGSAPGSEPATSGSETPGTSESATPESGPGSEPATSGSETPGTSTEPSEGSAPGTSTEPSEGSAPGSPAGSPTSTEEGSPAGSPTSTEEGTSESATPESGPGSPAGSPTSTEEGTSTEPSEGSAPGSEPATSGSETPGSEPATSGSETPGSPAGSPTSTEEGTSESATPESGPGTSTEPSEGSAPGSEPATSGSETPGTSESATPESGPGSEPATSGSETPGSPAGSPTSTEEGTSESATPESGPGTSESATPESGPGSEPATSGSETPGTSESATPESGPGTSESATPESGPGTSESATPESGPGTSTEPSEGSAPGTSESATPESGPGSEPATSGSETPGTSTEPSEGSAPGSPAGSPTSTEEGTSTEPSEGSAPGSEPATSGSETPGSPAGSPTSTEEGTSESATPESGPGTSESATPESGPGTSTEPSEGSAPGTSESATPESGPGTSTEPSEGSAPGTSESATPESGPGSEPATSGSETPGTSTEPSEGSAPGTSTEPSEGSAPGSPAGSPTSTEEGSPAGSPTSTEEGTSESATPESGPGTSTEPSEGSAPGTSESATPESGPGSPAGSPTSTEEGSPAGSPTSTEEGSPAGSPTSTEEGTSTEPSEGSAPGSPAGSPTSTEEGSPAGSPTSTEEGTSESATPESGPGSEPATSGSETPGSEPATSGSETPGTSESATPESGPGSEPATSGSETPGTSESATPESGPGTSTEPSEGSAPGTSTEPSEGSAPGSPAGSPTSTEEGSPAGSPTSTEEGTSESATPESGPGSPAGSPTSTEEGTSTEPSEGSAPGTSESATPESGPGTSE

SEQ ID NO: 99 - protein, 948 aa, Artificial Sequence
  Description of Artificial Sequence: Synthetic polypeptide
GSSTPSGATGSPGTPGSGTASSSPGASPGTSSTGSPGSSPSASTGTGPGTPGSGTASSSPGTPGSGTASSSPGTPGSGTASSSPGSSPSASTGTGPGTPGSGTASSSPGSSPSASTGTGPGSSTPSGATGSPGSSTPSGATGSPGSSPSASTGTGPGSSTPSGATGSPGASPGTSSTGSPGASPGTSSTGSPGSSPSASTGTGPGSSPSASTGTGPGASPGTSSTGSPGSSPSASTGTGPGASPGTSSTGSPGSSPSASTGTGPGASPGTSSTGSPGTPGSGTASSSPGTPGSGTASSSPGSSTPSGATGSPGSSTPSGATGSPGSSTPSGATGSPGASPGTSSTGSPGSSPSASTGTGPGASPGTSSTGSPGASPGTSSTGSPGSSTPSGATGSPGSSPSASTGTGPGSSPSASTGTGPGTPGSGTASSSPGASPGTSSTGSPGTPGSGTASSSPGSSTPSGATGSPGSSTPSGATGSPGSSPSASTGTGPGSSPSASTGTGPGSSTPSGATGSPGASPGTSSTGSPGTPGSGTASSSPGSSPSASTGTGPGSSTPSGATGSPGASPGTSSTGSPGSSTPSGATGSPGTPGSGTASSSPGSSPSASTGTGPGSSTPSGATGSPGASPGTSSTGSPGASPGTSSTGSPGTPGSGTASSSPGTPGSGTASSSPGSSPSASTGTGPGASPGTSSTGSPGASPGTSSTGSPGTPGSGTASSSPGTPGSGTASSSPGSSTPSGATGSPGSSPSASTGTGPGSSTPSGATGSPGSSPSASTGTGPGSSPSASTGTGPGTPGSGTASSSPGSSTPSGATGSPGASPGTSSTGSPGTPGSGTASSSPGTPGSGTASSSPGSSTPSGATGSPGTPGSGTASSSPGASPGTSSTGSPGSSTPSGATGSPGSSTPSGATGSPGTPGSGTASSSPGSSTPSGATGSPGSSTPSGATGSP

SEQ ID NO: 100 - protein, 1024 aa, Artificial Sequence
  Description of Artificial Sequence: Synthetic polypeptide
GTPGSGTASSSPGTPGSGTASSSPGSSPSASTGTGPGTPGSGTASSSPGASPGTSSTGSPGTPGSGTASSSPGSSPSASTGTGPGSSTPSGATGSPGASPGTSSTGSPGASPGTSSTGSPGSSPSASTGTGPGSSTPSGATGSPGSSPSASTGTGPGSSPSASTGTGPGTPGSGTASSSPGTPGSGTASSSPGASPGTSSTGSPGSSTPSGATGSPGSSPSASTGTGPGTPGSGTASSSPGASPGTSSTGSPGTPGSGTASSSPGSSPSASTGTGPGSSPSASTGTGPGASPGTSSTGSPGASPGTSSTGSPGSSTPSGATGSPGSSTPSGATGSPGTPGSGTASSSPGSSPSASTGTGPGSSTPSGATGSPGASPGTSSTGSPGSSTPSGATGSPGSSTPSGATGSPGSSPSASTGTGPGASPGTSSTGSPGTPGSGTASSSPGASPGTSSTGSPGSSPSASTGTGPGTPGSGTASSSPGASPGTSSTGSPGASPGTSSTGSPGSSTPSGATGSPGTPGSGTASSSPGSSTPSGATGSPGASPGTSSTGSPGTPGSGTASSSPGTPGSGTASSSPGSSTPSGATGSPGSSTPSGATGSPGTPGSGTASSSPGSSTPSGATGSPGSSTPSGATGSPGASPGTSSTGSPGSSPSASTGTGPGSSPSASTGTGPGASPGTSSTGSPGASPGTSSTGSPGTPGSGTASSSPGSSPSASTGTGPGTPGSGTASSSPGSSTPSGATGSPGSSTPSGATGSPGASPGTSSTGSPGSSPSASTGTGPGASPGTSSTGSPGSSPSASTGTGPGSSPSASTGTGPGASPGTSSTGSPGASPGTSSTGSPGSSTPSGATGSPGASPGTSSTGSPGASPGTSSTGSPGTPGSGTASSSPGTPGSGTASSSPGTPGSGTASSSPGSSTPSGATGSPGSSTPSGATGSPGSSPSASTGTGPGSSPSASTGTGPGTPGSGTASSSPGSSPSASTGTGPGASPGTSSTGSPGSSTPSGATGSPGTPGSGTASSSPGSST

SEQ ID NO: 101 - protein, 1024 aa, Artificial Sequence
  Description of Artificial Sequence: Synthetic polypeptide
GASPGTSSTGSPGSSPSASTGTGPGSSTPSGATGSPGASPGTSSTGSPGASPGTSSTGSPGSSTPSGATGSPGTPGSGTASSSPGASPGTSSTGSPGTPGSGTASSSPGTPGSGTASSSPGSSTPSGATGSPGSSTPSGATGSPGTPGSGTASSSPGSSTPSGATGSPGSSTPSGATGSPGSSPSASTGTGPGSSPSASTGTGPGASPGTSSTGSPGTPGSGTASSSPGASPGTSSTGSPGSSTPSGATGSPGTPGSGTASSSPGSSPSASTGTGPGSSTPSGATGSPGSSPSASTGTGPGSSTPSGATGSPGASPGTSSTGSPGSSPSASTGTGPGTPGSGTASSSPGASPGTSSTGSPGSSTPSGATGSPGASPGTSSTGSPGSSPSASTGTGPGTPGSGTASSSPGTPGSGTASSSPGASPGTSSTGSPGTPGSGTASSSPGTPGSGTASSSPGSSPSASTGTGPGASPGTSSTGSPGSSTPSGATGSPGASPGTSSTGSPGSSPSASTGTGPGTPGSGTASSSPGSSPSASTGTGPGSSPSASTGTGPGASPGTSSTGSPGASPGTSSTGSPGTPGSGTASSSPGASPGTSSTGSPGASPGTSSTGSPGTPGSGTASSSPGTPGSGTASSSPGSSTPSGATGSPGSSTPSGATGSPGTPGSGTASSSPGSSPSASTGTGPGTPGSGTASSSPGSSTPSGATGSPGSSTPSGATGSPGASPGTSSTGSPGTPGSGTASSSPGASPGTSSTGSPGSSTPSGATGSPGSSTPSGATGSPGTPGSGTASSSPGSSTPSGATGSPGSSTPSGATGSPGASPGTSSTGSPGSSPSASTGTGPGSSTPSGATGSPGSSTPSGATGSPGSSPSASTGTGPGSSPSASTGTGPGSSTPSGATGSPGASPGTSSTGSPGSSPSASTGTGPGTPGSGTASSSPGASPGTSSTGSPGSSPSASTGTGPGASPGTSSTGSPGSSTPSGATGSPGSSPSASTGTGPGSSPSASTGTGPGASPGTSSTGSPGSST

SEQ ID NO: 102 - protein, 1024 aa, Artificial Sequence
  Description of Artificial Sequence: Synthetic polypeptide
GSSPSASTGTGPGTPGSGTASSSPGSSPSASTGTGPGSSPSASTGTGPGTPGSGTASSSPGASPGTSSTGSPGSSTPSGATGSPGTPGSGTASSSPGASPGTSSTGSPGTPGSGTASSSPGTPGSGTASSSPGSSPSASTGTGPGSSPSASTGTGPGSSTPSGATGSPGASPGTSSTGSPGSSPSASTGTGPGTPGSGTASSSPGTPGSGTASSSPGSSTPSGATGSPGASPGTSSTGSPGSSPSASTGTGPGTPGSGTASSSPGTPGSGTASSSPGASPGTSSTGSPGSSTPSGATGSPGSSTPSGATGSPGSSPSASTGTGPGSSPSASTGTGPGASPGTSSTGSPGSSPSASTGTGPGSSTPSGATGSPGASPGTSSTGSPGASPGTSSTGSPGSSTPSGATGSPGSSPSASTGTGPGASPGTSSTGSPGASPGTSSTGSPGTPGSGTASSSPGSSTPSGATGSPGASPGTSSTGSPGSSTPSGATGSPGTPGSGTASSSPGSSPSASTGTGPGSSTPSGATGSPGTPGSGTASSSPGSSTPSGATGSPGSSTPSGATGSPGASPGTSSTGSPGSSPSASTGTGPGSSPSASTGTGPGASPGTSSTGSPGSSPSASTGTGPGTPGSGTASSSPGTPGSGTASSSPGASPGTSSTGSPGTPGSGTASSSPGASPGTSSTGSPGTPGSGTASSSPGASPGTSSTGSPGSSTPSGATGSPGASPGTSSTGSPGSSPSASTGTGPGTPGSGTASSSPGTPGSGTASSSPGSSPSASTGTGPGTPGSGTASSSPGASPGTSSTGSPGSSTPSGATGSPGTPGSGTASSSPGASPGTSSTGSPGTPGSGTASSSPGTPGSGTASSSPGSSTPSGATGSPGTPGSGTASSSPGSSPSASTGTGPGSSTPSGATGSPGTPGSGTASSSPGSSTPSGATGSPGSSTPSGATGSPGSSPSASTGTGPGASPGTSSTGSPGTPGSGTASSSPGSSPSASTGTGPGSSPSASTGTGPGASPGTSSTGSPGASP

SEQ ID NO: 103 - protein, 1024 aa, Artificial Sequence
  Description of Artificial Sequence: Synthetic polypeptide
GSSTPSGATGSPGSSPSASTGTGPGTPGSGTASSSPGSSPSASTGTGPGASPGTSSTGSPGSSPSASTGTGPGTPGSGTASSSPGASPGTSSTGSPGSSTPSGATGSPGSSPSASTGTGPGSSTPSGATGSPGASPGTSSTGSPGTPGSGTASSSPGASPGTSSTGSPGSSTPSGATGSPGSSTPSGATGSPGSSPSASTGTGPGTPGSGTASSSPGSSTPSGATGSPGSSTPSGATGSPGSSPSASTGTGPGTPGSGTASSSPGASPGTSSTGSPGTPGSGTASSSPGASPGTSSTGSPGASPGTSSTGSPGTPGSGTASSSPGTPGSGTASSSPGSSTPSGATGSPGSSTPSGATGSPGSSTPSGATGSPGASPGTSSTGSPGSSPSASTGTGPGSSTPSGATGSPGSSPSASTGTGPGSSTPSGATGSPGTPGSGTASSSPGSSPSASTGTGPGSSTPSGATGSPGASPGTSSTGSPGASPGTSSTGSPGSSPSASTGTGPGASPGTSSTGSPGSSTPSGATGSPGASPGTSSTGSPGTPGSGTASSSPGTPGSGTASSSPGSSPSASTGTGPGTPGSGTASSSPGSSTPSGATGSPGSSPSASTGTGPGSSTPSGATGSPGTPGSGTASSSPGTPGSGTASSSPGSSPSASTGTGPGSSTPSGATGSPGSSTPSGATGSPGSSPSASTGTGPGSSPSASTGTGPGASPGTSSTGSPGASPGTSSTGSPGSSTPSGATGSPGASPGTSSTGSPGSSPSASTGTGPGTPGSGTASSSPGASPGTSSTGSPGASPGTSSTGSPGTPGSGTASSSPGTPGSGTASSSPGSSPSASTGTGPGTPGSGTASSSPGASPGTSSTGSPGSSTPSGATGSPGTPGSGTASSSPGTPGSGTASSSPGSSTPSGATGSPGSSTPSGATGSPGTPGSGTASSSPGSSPSASTGTGPGSSPSASTGTGPGASPGTSSTGSPGSSPSASTGTGPGSSPSASTGTGPGASPGTSSTGSPGASPGTSSTGSPGTPG

SEQ ID NO: 104 - protein, 1024 aa, Artificial Sequence
  Description of Artificial Sequence: Synthetic polypeptide
GTPGSGTASSSPGSSTPSGATGSPGASPGTSSTGSPGSSTPSGATGSPGTPGSGTASSSPGTPGSGTASSSPGSSTPSGATGSPGSSTPSGATGSPGASPGTSSTGSPGSSPSASTGTGPGSSTPSGATGSPGASPGTSSTGSPGSSPSASTGTGPGTPGSGTASSSPGASPGTSSTGSPGASPGTSSTGSPGTPGSGTASSSPGTPGSGTASSSPGASPGTSSTGSPGASPGTSSTGSPGTPGSGTASSSPGTPGSGTASSSPGSSPSASTGTGPGSSPSASTGTGPGASPGTSSTGSPGSSPSASTGTGPGSSPSASTGTGPGASPGTSSTGSPGASPGTSSTGSPGTPGSGTASSSPGTPGSGTASSSPGSSPSASTGTGPGASPGTSSTGSPGSSTPSGATGSPGASPGTSSTGSPGSSPSASTGTGPGSSTPSGATGSPGSSPSASTGTGPGSSPSASTGTGPGASPGTSSTGSPGSSPSASTGTGPGSSPSASTGTGPGASPGTSSTGSPGASPGTSSTGSPGSSPSASTGTGPGTPGSGTASSSPGASPGTSSTGSPGSSTPSGATGSPGTPGSGTASSSPGTPGSGTASSSPGSSPSASTGTGPGSSTPSGATGSPGASPGTSSTGSPGASPGTSSTGSPGSSTPSGATGSPGSSPSASTGTGPGASPGTSSTGSPGSSTPSGATGSPGTPGSGTASSSPGASPGTSSTGSPGTPGSGTASSSPGASPGTSSTGSPGSSTPSGATGSPGSSTPSGATGSPGASPGTSSTGSPGSSPSASTGTGPGTPGSGTASSSPGTPGSGTASSSPGSSTPSGATGSPGTPGSGTASSSPGASPGTSSTGSPGSSTPSGATGSPGTPGSGTASSSPGSSPSASTGTGPGSSTPSGATGSPGSSTPSGATGSPGSSPSASTGTGPGSSTPSGATGSPGTPGSGTASSSPGSSPSASTGTGPGTPGSGTASSSPGSSTPSGATGSPGSSPSASTGTGPGSSPSASTGTGPGTPGSGTASSSPGASP

SEQ ID NO: 105 - protein, 1024 aa, Artificial Sequence
  Description of Artificial Sequence: Synthetic polypeptide
GSSTPSGATGSPGTPGSGTASSSPGTPGSGTASSSPGASPGTSSTGSPGSSTPSGATGSPGTPGSGTASSSPGSSTPSGATGSPGSSPSASTGTGPGSSTPSGATGSPGTPGSGTASSSPGTPGSGTASSSPGSSPSASTGTGPGSSTPSGATGSPGSSPSASTGTGPGTPGSGTASSSPGASPGTSSTGSPGSSTPSGATGSPGASPGTSSTGSPGTPGSGTASSSPGSSTPSGATGSPGTPGSGTASSSPGSSPSASTGTGPGASPGTSSTGSPGASPGTSSTGSPGTPGSGTASSSPGSSTPSGATGSPGSSTPSGATGSPGSSPSASTGTGPGSSPSASTGTGPGASPGTSSTGSPGTPGSGTASSSPGTPGSGTASSSPGSSPSASTGTGPGASPGTSSTGSPGASPGTSSTGSPGTPGSGTASSSPGSSPSASTGTGPGASPGTSSTGSPGASPGTSSTGSPGSSTPSGATGSPGSSPSASTGTGPGSSPSASTGTGPGTPGSGTASSSPGTPGSGTASSSPGASPGTSSTGSPGSSTPSGATGSPGTPGSGTASSSPGASPGTSSTGSPGTPGSGTASSSPGTPGSGTASSSPGSSTPSGATGSPGSSTPSGATGSPGTPGSGTASSSPGSSPSASTGTGPGSSTPSGATGSPGSSTPSGATGSPGSSPSASTGTGPGTPGSGTASSSPGSSPSASTGTGPGASPGTSSTGSPGSSPSASTGTGPGTPGSGTASSSPGASPGTSSTGSPGASPGTSSTGSPGTPGSGTASSSPGTPGSGTASSSPGSSTPSGATGSPGTPGSGTASSSPGASPGTSSTGSPGSSTPSGATGSPGSSTPSGATGSPGSSTPSGATGSPGTPGSGTASSSPGSSPSASTGTGPGSSPSASTGTGPGSSPSASTGTGPGASPGTSSTGSPGASPGTSSTGSPGSSPSASTGTGPGTPGSGTASSSPGASPGTSSTGSPGSSTPSGATGSPGASPGTSSTGSPGASPGTSSTGSPGSSTPSGATGSPGTPG

SEQ ID NO: 106 - protein, 1024 aa, Artificial Sequence
  Description of Artificial Sequence: Synthetic polypeptide
GSSTPSGATGSPGSSTPSGATGSPGTPGSGTASSSPGSSPSASTGTGPGTPGSGTASSSPGASPGTSSTGSPGSSTPSGATGSPGASPGTSSTGSPGTPGSGTASSSPGASPGTSSTGSPGSSPSASTGTGPGTPGSGTASSSPGASPGTSSTGSPGSSTPSGATGSPGSSPSASTGTGPGSSTPSGATGSPGASPGTSSTGSPGASPGTSSTGSPGASPGTSSTGSPGSSTPSGATGSPGASPGTSSTGSPGTPGSGTASSSPGSSTPSGATGSPGSSTPSGATGSPGSSPSASTGTGPGSSPSASTGTGPGSSTPSGATGSPGSSPSASTGTGPGSSPSASTGTGPGASPGTSSTGSPGASPGTSSTGSPGTPGSGTASSSPGSSPSASTGTGPGSSPSASTGTGPGASPGTSSTGSPGSSPSASTGTGPGTPGSGTASSSPGSSPSASTGTGPGSSTPSGATGSPGASPGTSSTGSPGSSTPSGATGSPGTPGSGTASSSPGSSPSASTGTGPGASPGTSSTGSPGSSTPSGATGSPGASPGTSSTGSPGASPGTSSTGSPGTPGSGTASSSPGASPGTSSTGSPGASPGTSSTGSPGSSTPSGATGSPGTPGSGTASSSPGSSPSASTGTGPGSSTPSGATGSPGTPGSGTASSSPGSSTPSGATGSPGSSTPSGATGSPGSSPSASTGTGPGSSPSASTGTGPGSSTPSGATGSPGASPGTSSTGSPGSSPSASTGTGPGTPGSGTASSSPGASPGTSSTGSPGSSPSASTGTGPGSSTPSGATGSPGSSPSASTGTGPGSSTPSGATGSPGSSPSASTGTGPGTPGSGTASSSPGTPGSGTASSSPGSSTPSGATGSPGSSTPSGATGSPGTPGSGTASSSPGSSPSASTGTGPGSSTPSGATGSPGSSPSASTGTGPGSSPSASTGTGPGSSTPSGATGSPGASPGTSSTGSPGASPGTSSTGSPGTPGSGTASSSPGTPGSGTASSSPGTPGSGTASSSPGSSTPSGATGSPGSST

SEQ ID NO: 107 - protein, 1024 aa, Artificial Sequence
  Description of Artificial Sequence: Synthetic polypeptide
GASPGTSSTGSPGSSPSASTGTGPGSSTPSGATGSPGSSPSASTGTGPGTPGSGTASSSPGSSTPSGATGSPGSSTPSGATGSPGSSPSASTGTGPGSSTPSGATGSPGTPGSGTASSSPGSSPSASTGTGPGSSTPSGATGSPGASPGTSSTGSPGSSPSASTGTGPGSSPSASTGTGPGTPGSGTASSSPGASPGTSSTGSPGSSTPSGATGSPGSSPSASTGTGPGASPGTSSTGSPGSSTPSGATGSPGTPGSGTASSSPGSSPSASTGTGPGSSPSASTGTGPGSSPSASTGTGPGTPGSGTASSSPGTPGSGTASSSPGSSTPSGATGSPGTPGSGTASSSPGSSPSASTGTGPGASPGTSSTGSPGASPGTSSTGSPGTPGSGTASSSPGSSPSASTGTGPGASPGTSSTGSPGTPGSGTASSSPGSSTPSGATGSPGSSTPSGATGSPGASPGTSSTGSPGTPGSGTASSSPGSSPSASTGTGPGTPGSGTASSSPGASPGTSSTGSPGSSTPSGATGSPGASPGTSSTGSPGASPGTSSTGSPGTPGSGTASSSPGTPGSGTASSSPGSSPSASTGTGPGSSPSASTGTGPGSSPSASTGTGPGTPGSGTASSSPGASPGTSSTGSPGSSTPSGATGSPGASPGTSSTGSPGSSPSASTGTGPGASPGTSSTGSPGSSPSASTGTGPGASPGTSSTGSPGSSPSASTGTGPGSSPSASTGTGPGTPGSGTASSSPGASPGTSSTGSPGTPGSGTASSSPGTPGSGTASSSPGASPGTSSTGSPGSSTPSGATGSPGSSTPSGATGSPGSSPSASTGTGPGSSTPSGATGSPGTPGSGTASSSPGSSPSASTGTGPGSSTPSGATGSPGSSTPSGATGSPGSSPSASTGTGPGSSPSASTGTGPGASPGTSSTGSPGTPGSGTASSSPGSSPSASTGTGPGSSTPSGATGSPGASPGTSSTGSPGASPGTSSTGSPGSSPSASTGTGPGASPGTSSTGSPGASPGTSSTGSPGTPG

SEQ ID NO: 108 - protein, 1024 aa, Artificial Sequence
  Description of Artificial Sequence: Synthetic polypeptide
GSSTPSGATGSPGSSPSASTGTGPGASPGTSSTGSPGASPGTSSTGSPGTPGSGTASSSPGSSPSASTGTGPGASPGTSSTGSPGSSTPSGATGSPGSSTPSGATGSPGASPGTSSTGSPGSSPSASTGTGPGTPGSGTASSSPGTPGSGTASSSPGASPGTSSTGSPGSSTPSGATGSPGSSTPSGATGSPGSSPSASTGTGPGTPGSGTASSSPGASPGTSSTGSPGSSTPSGATGSPGTPGSGTASSSPGSSPSASTGTGPGSSTPSGATGSPGTPGSGTASSSPGSSPSASTGTGPGTPGSGTASSSPGASPGTSSTGSPGSSTPSGATGSPGSSTPSGATGSPGTPGSGTASSSPGSSTPSGATGSPGSSTPSGATGSPGASPGTSSTGSPGASPGTSSTGSPGASPGTSSTGSPGSSTPSGATGSPGTPGSGTASSSPGSSPSASTGTGPGTPGSGTASSSPGASPGTSSTGSPGTPGSGTASSSPGASPGTSSTGSPGSSTPSGATGSPGSSPSASTGTGPGSSPSASTGTGPGTPGSGTASSSPGASPGTSSTGSPGASPGTSSTGSPGTPGSGTASSSPGASPGTSSTGSPGSSTPSGATGSPGSSTPSGATGSPGSSPSASTGTGPGASPGTSSTGSPGASPGTSSTGSPGTPGSGTASSSPGTPGSGTASSSPGSSTPSGATGSPGSSPSASTGTGPGSSPSASTGTGPGASPGTSSTGSPGASPGTSSTGSPGSSTPSGATGSPGSSPSASTGTGPGASPGTSSTGSPGSSTPSGATGSPGTPGSGTASSSPGSSPSASTGTGPGASPGTSSTGSPGSSTPSGATGSPGTPGSGTASSSPGSSTPSGATGSPGSSTPSGATGSPGSSTPSGATGSPGSSPSASTGTGPGSSPSASTGTGPGSSTPSGATGSPGSSPSASTGTGPGSSPSASTGTGPGSSTPSGATGSPGASPGTSSTGSPGASPGTSSTGSPGTPGSGTASSSPGASPGTSSTGSPGSSTPSGATGSPGASP

SEQ ID NO: 109 - protein, 1024 aa, Artificial Sequence
  Description of Artificial Sequence: Synthetic polypeptide
GSSPSASTGTGPGSSPSASTGTGPGSSPSASTGTGPGTPGSGTASSSPGSSPSASTGTGPGSSPSASTGTGPGASPGTSSTGSPGSSPSASTGTGPGTPGSGTASSSPGTPGSGTASSSPGASPGTSSTGSPGTPGSGTASSSPGTPGSGTASSSPGSSPSASTGTGPGSSTPSGATGSPGSSPSASTGTGPGASPGTSSTGSPGSSPSASTGTGPGASPGTSSTGSPGASPGTSSTGSPGTPGSGTASSSPGTPGSGTASSSPGASPGTSSTGSPGTPGSGTASSSPGTPGSGTASSSPGSSPSASTGTGPGSSTPSGATGSPGASPGTSSTGSPGSSTPSGATGSPGSSPSASTGTGPGSSPSASTGTGPGSSTPSGATGSPGASPGTSSTGSPGSSPSASTGTGPGTPGSGTASSSPGASPGTSSTGSPGASPGTSSTGSPGTPGSGTASSSPGTPGSGTASSSPGSSTPSGATGSPGTPGSGTASSSPGASPGTSSTGSPGSSTPSGATGSPGTPGSGTASSSPGSSPSASTGTGPGSSPSASTGTGPGSSTPSGATGSPGASPGTSSTGSPGASPGTSSTGSPGTPGSGTASSSPGTPGSGTASSSPGSSTPSGATGSPGSSPSASTGTGPGSSPSASTGTGPGASPGTSSTGSPGASPGTSSTGSPGSSTPSGATGSPGASPGTSSTGSPGASPGTSSTGSPGTPGSGTASSSPGTPGSGTASSSPGTPGSGTASSSPGSSTPSGATGSPGSSTPSGATGSPGSSPSASTGTGPGSSPSASTGTGPGSSTPSGATGSPGTPGSGTASSSPGSSPSASTGTGPGASPGTSSTGSPGSSTPSGATGSPGSSPSASTGTGPGSSTPSGATGSPGASPGTSSTGSPGSSPSASTGTGPGTPGSGTASSSPGSSPSASTGTGPGSSTPSGATGSPGASPGTSSTGSPGSSPSASTGTGPGTPGSGTASSSPGSSTPSGATGSPGSSTPSGATGSPGASPGTSSTGSPGSSPSASTGTGPGSSP

SEQ ID NO: 110 - protein, 1024 aa, Artificial Sequence
  Description of Artificial Sequence: Synthetic polypeptide
GSSPSASTGTGPGTPGSGTASSSPGSSTPSGATGSPGTPGSGTASSSPGSSTPSGATGSPGSSTPSGATGSPGSSPSASTGTGPGSSPSASTGTGPGSSPSASTGTGPGTPGSGTASSSPGASPGTSSTGSPGSSTPSGATGSPGTPGSGTASSSPGTPGSGTASSSPGSSTPSGATGSPGSSTPSGATGSPGSSPSASTGTGPGASPGTSSTGSPGASPGTSSTGSPGASPGTSSTGSPGASPGTSSTGSPGTPGSGTASSSPGTPGSGTASSSPGSSPSASTGTGPGSSTPSGATGSPGASPGTSSTGSPGSSTPSGATGSPGSSTPSGATGSPGSSPSASTGTGPGASPGTSSTGSPGTPGSGTASSSPGSSPSASTGTGPGSSPSASTGTGPGASPGTSSTGSPGASPGTSSTGSPGTPGSGTASSSPGASPGTSSTGSPGTPGSGTASSSPGTPGSGTASSSPGSSTPSGATGSPGTPGSGTASSSPGASPGTSSTGSPGSSTPSGATGSPGSSTPSGATGSPGSSPSASTGTGPGSSTPSGATGSPGSSTPSGATGSPGASPGTSSTGSPGSSPSASTGTGPGTPGSGTASSSPGASPGTSSTGSPGSSPSASTGTGPGTPGSGTASSSPGSSPSASTGTGPGTPGSGTASSSPGASPGTSSTGSPGASPGTSSTGSPGTPGSGTASSSPGTPGSGTASSSPGSSTPSGATGSPGSSTPSGATGSPGTPGSGTASSSPGSSTPSGATGSPGSSTPSGATGSPGASPGTSSTGSPGSSPSASTGTGPGSSTPSGATGSPGSSPSASTGTGPGSSPSASTGTGPGASPGTSSTGSPGSSTPSGATGSPGASPGTSSTGSPGTPGSGTASSSPGTPGSGTASSSPGSSPSASTGTGPGASPGTSSTGSPGSSTPSGATGSPGSSPSASTGTGPGSSPSASTGTGPGASPGTSSTGSPGTPGSGTASSSPGSSTPSGATGSPGTPGSGTASSSPGSSPSASTGTGPGSSPSASTGTGPGASP

SEQ ID NO: 111 - protein, 72 aa, Artificial Sequence
  Description of Artificial Sequence: Synthetic polypeptide
SPAGSPTSTEEGSPAGSPTSTEEGTSESATPESGPGTSTEPSEGSAPGTSESATPESGPGSEPATSGSETPG

SEQ ID NO: 112 - protein, 72 aa, Artificial Sequence
  Description of Artificial Sequence: Synthetic polypeptide
TSESATPESGPGTSESATPESGPGSEPATSGSETPGSEPATSGSETPGSPAGSPTSTEEGTSTEPSEGSAPG

SEQ ID NO: 113 - protein, 108 aa, Artificial Sequence
  Description of Artificial Sequence: Synthetic polypeptide
TEEGTSESATPESGPGTSTEPSEGSAPGSPAGSPTSTEEGTSTEPSEGSAPGTSTEPSEGSAPGTSESATPESGPGSEPATSGSETPGSEPATSGSETPGSPAGSPTS

SEQ ID NO: 114 - protein, 108 aa, Artificial Sequence
  Description of Artificial Sequence: Synthetic polypeptide
GSPAGSPTSTEEGTSTEPSEGSAPGTSESATPESGPGTSESATPESGPGTSESATPESGPGSEPATSGSETPGSEPATSGSETPGSPAGSPTSTEEGTSTEPSEGSAP

SEQ ID NO: 115 - protein, 144 aa, Artificial Sequence
  Description of Artificial Sequence: Synthetic polypeptide
STEPSEGSAPGSPAGSPTSTEEGTSTEPSEGSAPGTSESATPESGPGSEPATSGSETPGTSESATPESGPGSEPATSGSETPGTSESATPESGPGTSTEPSEGSAPGTSESATPESGPGSPAGSPTSTEEGSPAGSPTSTEEGS

SEQ ID NO: 116 - protein, 144 aa, Artificial Sequence
  Description of Artificial Sequence: Synthetic polypeptide
SEPATSGSETPGTSESATPESGPGSEPATSGSETPGTSESATPESGPGTSTEPSEGSAPGSPAGSPTSTEEGTSESATPESGPGSEPATSGSETPGTSESATPESGPGSPAGSPTSTEEGSPAGSPTSTEEGTSTEPSEGSAPG

SEQ ID NO: 117 - protein, 180 aa, Artificial Sequence
  Description of Artificial Sequence: Synthetic polypeptide
TSTEEGTSESATPESGPGSEPATSGSETPGTSESATPESGPGSPAGSPTSTEEGSPAGSPTSTEEGTSTEPSEGSAPGTSESATPESGPGTSESATPESGPGTSESATPESGPGSEPATSGSETPGSEPATSGSETPGSPAGSPTSTEEGTSTEPSEGSAPGTSTEPSEGSAPGSEPATS

SEQ ID NO: 118 - protein, 216 aa, Artificial Sequence
  Description of Artificial Sequence: Synthetic polypeptide
PESGPGTSTEPSEGSAPGSPAGSPTSTEEGTSESATPESGPGSEPATSGSETPGTSESATPESGPGSPAGSPTSTEEGSPAGSPTSTEEGTSTEPSEGSAPGTSESATPESGPGTSESATPESGPGTSESATPESGPGSEPATSGSETPGSEPATSGSETPGSPAGSPTSTEEGTSTEPSEGSAPGTSTEPSEGSAPGSEPATSGSETPGTSESAT

SEQ ID NO: 119 - protein, 252 aa, Artificial Sequence
  Description of Artificial Sequence: Synthetic polypeptide
ESGPGSEPATSGSETPGTSESATPESGPGTSTEPSEGSAPGSPAGSPTSTEEGTSESATPESGPGSEPATSGSETPGTSESATPESGPGSPAGSPTSTEEGSPAGSPTSTEEGTSTEPSEGSAPGTSESATPESGPGTSESATPESGPGTSESATPESGPGSEPATSGSETPGSEPATSGSETPGSPAGSPTSTEEGTSTEPSEGSAPGTSTEPSEGSAPGSEPATSGSETPGTSESATPESGPGTSTEPSE

SEQ ID NO: 120 - protein, 288 aa, Artificial Sequence
  Description of Artificial Sequence: Synthetic polypeptide
TPESGPGTSTEPSEGSAPGTSESATPESGPGSEPATSGSETPGTSESATPESGPGSEPATSGSETPGTSESATPESGPGTSTEPSEGSAPGSPAGSPTSTEEGTSESATPESGPGSEPATSGSETPGTSESATPESGPGSPAGSPTSTEEGSPAGSPTSTEEGTSTEPSEGSAPGTSESATPESGPGTSESATPESGPGTSESATPESGPGSEPATSGSETPGSEPATSGSETPGSPAGSPTSTEEGTSTEPSEGSAPGTSTEPSEGSAPGSEPATSGSETPGTSESA

SEQ ID NO: 121 - protein, 324 aa, Artificial Sequence
  Description of Artificial Sequence: Synthetic polypeptide
PESGPGSPAGSPTSTEEGSPAGSPTSTEEGSPAGSPTSTEEGTSESATPESGPGTSTEPSEGSAPGTSESATPESGPGSEPATSGSETPGTSESATPESGPGSEPATSGSETPGTSESATPESGPGTSTEPSEGSAPGSPAGSPTSTEEGTSESATPESGPGSEPATSGSETPGTSESATPESGPGSPAGSPTSTEEGSPAGSPTSTEEGTSTEPSEGSAPGTSESATPESGPGTSESATPESGPGTSESATPESGPGSEPATSGSETPGSEPATSGSETPGSPAGSPTSTEEGTSTEPSEGSAPGTSTEPSEGSAPGSEPATS

SEQ ID NO: 122 - protein, 360 aa, Artificial Sequence
  Description of Artificial Sequence: Synthetic polypeptide
PESGPGTSTEPSEGSAPGTSESATPESGPGSPAGSPTSTEEGSPAGSPTSTEEGSPAGSPTSTEEGTSESATPESGPGTSTEPSEGSAPGTSESATPESGPGSEPATSGSETPGTSESATPESGPGSEPATSGSETPGTSESATPESGPGTSTEPSEGSAPGSPAGSPTSTEEGTSESATPESGPGSEPATSGSETPGTSESATPESGPGSPAGSPTSTEEGSPAGSPTSTEEGTSTEPSEGSAPGTSESATPESGPGTSESATPESGPGTSESATPESGPGSEPATSGSETPGSEPATSGSETPGSPAGSPTSTEEGTSTEPSEGSAPGTSTEPSEGSAPGSEPATSGSETPGTSESAT

SEQ ID NO: 123 - protein, 360 aa, Artificial Sequence
  Description of Artificial Sequence: Synthetic polypeptide
PESGPGSEPATSGSETPGTSESATPESGPGTSTEPSEGSAPGTSESATPESGPGSPAGSPTSTEEGSPAGSPTSTEEGSPAGSPTSTEEGTSESATPESGPGTSTEPSEGSAPGTSESATPESGPGSEPATSGSETPGTSESATPESGPGSEPATSGSETPGTSESATPESGPGTSTEPSEGSAPGSPAGSPTSTEEGTSESATPESGPGSEPATSGSETPGTSESATPESGPGSPAGSPTSTEEGSPAGSPTSTEEGTSTEPSEGSAPGTSESATPESGPGTSESATPESGPGTSESATPESGPGSEPATSGSETPGSEPATSGSETPGSPAGSPTSTEEGTSTEPSEGSAPGTSTEPS

SEQ ID NO: 124 - protein, 432 aa, Artificial Sequence
  Description of Artificial Sequence: Synthetic polypeptide
EGSAPGSPAGSPTSTEEGTSTEPSEGSAPGTSESATPESGPGSEPATSGSETPGTSESATPESGPGSEPATSGSETPGTSESATPESGPGTSTEPSEGSAPGTSESATPESGPGSPAGSPTSTEEGSPAGSPTSTEEGSPAGSPTSTEEGTSESATPESGPGTSTEPSEGSAPGTSESATPESGPGSEPATSGSETPGTSESATPESGPGSEPATSGSETPGTSESATPESGPGTSTEPSEGSAPGSPAGSPTSTEEGTSESATPESGPGSEPATSGSETPGTSESATPESGPGSPAGSPTSTEEGSPAGSPTSTEEGTSTEPSEGSAPGTSESATPESGPGTSESATPESGPGTSESATPESGPGSEPATSGSETPGSEPATSGSETPGSPAGSPTSTEEGTSTEPSEGSAPGTSTEPSEGSAPGSEPATS

SEQ ID NO: 125 - protein, 468 aa, Artificial Sequence
  Description of Artificial Sequence: Synthetic polypeptide
EGSAPGTSTEPSEGSAPGTSTEPSEGSAPGSPAGSPTSTEEGTSTEPSEGSAPGTSESATPESGPGSEPATSGSETPGTSESATPESGPGSEPATSGSETPGTSESATPESGPGTSTEPSEGSAPGTSESATPESGPGSPAGSPTSTEEGSPAGSPTSTEEGSPAGSPTSTEEGTSESATPESGPGTSTEPSEGSAPGTSESATPESGPGSEPATSGSETPGTSESATPESGPGSEPATSGSETPGTSESATPESGPGTSTEPSEGSAPGSPAGSPTSTEEGTSESATPESGPGSEPATSGSETPGTSESATPESGPGSPAGSPTSTEEGSPAGSPTSTEEGTSTEPSEGSAPGTSESATPESGPGTSESATPESGPGTSESATPESGPGSEPATSGSETPGSEPATSGSETPGSPAGSPTSTEEGTSTEPSEGSAPGTSTEPSEGSAPGSEPATSGSETPGTSESAT

SEQ ID NO: 126 - protein, 504 aa, Artificial Sequence
  Description of Artificial Sequence: Synthetic polypeptide
EGSAPGTSTEPSEGSAPGTSTEPSEGSAPGTSTEPSEGSAPGTSTEPSEGSAPGSPAGSPTSTEEGTSTEPSEGSAPGTSESATPESGPGSEPATSGSETPGTSESATPESGPGSEPATSGSETPGTSESATPESGPGTSTEPSEGSAPGTSESATPESGPGSPAGSPTSTEEGSPAGSPTSTEEGSPAGSPTSTEEGTSESATPESGPGTSTEPSEGSAPGTSESATPESGPGSEPATSGSETPGTSESATPESGPGSEPATSGSETPGTSESATPESGPGTSTEPSEGSAPGSPAGSPTSTEEGTSESATPESGPGSEPATSGSETPGTSESATPESGPGSPAGSPTSTEEGSPAGSPTSTEEGTSTEPSEGSAPGTSESATPESGPGTSESATPESGPGTSESATPESGPGSEPATSGSETPGSEPATSGSETPGSPAGSPTSTEEGTSTEPSEGSAPGTSTEPSEGSAPGSEPATSGSETPGTSESATPESGPGTSTEPS

SEQ ID NO: 127 - protein, 540 aa, Artificial Sequence
  Description of Artificial Sequence: Synthetic polypeptide
TPESGPGSPAGSPTSTEEGTSESATPESGPGSEPATSGSETPGTSESATPESGPGTSTEPSEGSAPGTSTEPSEGSAPGTSTEPSEGSAPGTSTEPSEGSAPGTSTEPSEGSAPGTSTEPSEGSAPGSPAGSPTSTEEGTSTEPSEGSAPGTSESATPESGPGSEPATSGSETPGTSESATPESGPGSEPATSGSETPGTSESATPESGPGTSTEPSEGSAPGTSESATPESGPGSPAGSPTSTEEGSPAGSPTSTEEGSPAGSPTSTEEGTSESATPESGPGTSTEPSEGSAPGTSESATPESGPGSEPATSGSETPGTSESATPESGPGSEPATSGSETPGTSESATPESGPGTSTEPSEGSAPGSPAGSPTSTEEGTSESATPESGPGSEPATSGSETPGTSESATPESGPGSPAGSPTSTEEGSPAGSPTSTEEGTSTEPSEGSAPGTSESATPESGPGTSESATPESGPGTSESATPESGPGSEPATSGSETPGSEPATSGSETPGSPAGSPTSTEEGTSTEPSEGSAPGTSTEP

SEQ ID NO: 128 - protein, 576 aa, Artificial Sequence
  Description of Artificial Sequence: Synthetic polypeptide
TPESGPGTSESATPESGPGSPAGSPTSTEEGTSESATPESGPGSEPATSGSETPGTSESATPESGPGTSTEPSEGSAPGTSTEPSEGSAPGTSTEPSEGSAPGTSTEPSEGSAPGTSTEPSEGSAPGTSTEPSEGSAPGSPAGSPTSTEEGTSTEPSEGSAPGTSESATPESGPGSEPATSGSETPGTSESATPESGPGSEPATSGSETPGTSESATPESGPGTSTEPSEGSAPGTSESATPESGPGSPAGSPTSTEEGSPAGSPTSTEEGSPAGSPTSTEEGTSESATPESGPGTSTEPSEGSAPGTSESATPESGPGSEPATSGSETPGTSESATPESGPGSEPATSGSETPGTSESATPESGPGTSTEPSEGSAPGSPAGSPTSTEEGTSESATPESGPGSEPATSGSETPGTSESATPESGPGSPAGSPTSTEEGSPAGSPTSTEEGTSTEPSEGSAPGTSESATPESGPGTSESATPESGPGTSESATPESGPGSEPATSGSETPGSEPATSGSETPGSPAGSPTSTEEGTSTEPSEGSAPGTSTEPSEGSAPGSEPATSGSETPGTSESA

SEQ ID NO: 129 - protein, 612 aa, Artificial Sequence
  Description of Artificial Sequence: Synthetic polypeptide
GSETPGTSTEPSEGSAPGTSTEPSEGSAPGTSESATPESGPGTSESATPESGPGSPAGSPTSTEEGTSESATPESGPGSEPATSGSETPGTSESATPESGPGTSTEPSEGSAPGTSTEPSEGSAPGTSTEPSEGSAPGTSTEPSEGSAPGTSTEPSEGSAPGTSTEPSEGSAPGSPAGSPTSTEEGTSTEPSEGSAPGTSESATPESGPGSEPATSGSETPGTSESATPESGPGSEPATSGSETPGTSESATPESGPGTSTEPSEGSAPGTSESATPESGPGSPAGSPTSTEEGSPAGSPTSTEEGSPAGSPTSTEEGTSESATPESGPGTSTEPSEGSAPGTSESATPESGPGSEPATSGSETPGTSESATPESGPGSEPATSGSETPGTSESATPESGPGTSTEPSEGSAPGSPAGSPTSTEEGTSESATPESGPGSEPATSGSETPGTSESATPESGPGSPAGSPTSTEEGSPAGSPTSTEEGTSTEPSEGSAPGTSESATPESGPGTSESATPESGPGTSESATPESGPGSEPATSGSETPGSEPATSGSETPGSPAGSPTSTEEGTSTEPSEGSAPGTSTEPSEGSAPGSEPATSGSETPGTSESAT

SEQ ID NO: 130 - protein, 648 aa, Artificial Sequence
  Description of Artificial Sequence: Synthetic polypeptide
PESGPGTSTEPSEGSAPGTSESATPESGPGSEPATSGSETPGTSTEPSEGSAPGTSTEPSEGSAPGTSESATPESGPGTSESATPESGPGSPAGSPTSTEEGTSESATPESGPGSEPATSGSETPGTSESATPESGPGTSTEPSEGSAPGTSTEPSEGSAPGTSTEPSEGSAPGTSTEPSEGSAPGTSTEPSEGSAPGTSTEPSEGSAPGSPAGSPTSTEEGTSTEPSEGSAPGTSESATPESGPGSEPATSGSETPGTSESATPESGPGSEPATSGSETPGTSESATPESGPGTSTEPSEGSAPGTSESATPESGPGSPAGSPTSTEEGSPAGSPTSTEEGSPAGSPTSTEEGTSESATPESGPGTSTEPSEGSAPGTSESATPESGPGSEPATSGSETPGTSESATPESGPGSEPATSGSETPGTSESATPESGPGTSTEPSEGSAPGSPAGSPTSTEEGTSESATPESGPGSEPATSGSETPGTSESATPESGPGSPAGSPTSTEEGSPAGSPTSTEEGTSTEPSEGSAPGTSESATPESGPGTSESATPESGPGTSESATPESGPGSEPATSGSETPGSEPATSGSETPGSPAGSPTSTEEGTSTEPSEGSAPGTSTEPSEGSAPGSEPATSGSETPGTSESAT

SEQ ID NO: 131 - protein, 684 aa, Artificial Sequence
  Description of Artificial Sequence: Synthetic polypeptide
EGSAPGSPAGSPTSTEEGTSTEPSEGSAPGTSTEPSEGSAPGTSESATPESGPGTSTEPSEGSAPGTSESATPESGPGSEPATSGSETPGTSTEPSEGSAPGTSTEPSEGSAPGTSESATPESGPGTSESATPESGPGSPAGSPTSTEEGTSESATPESGPGSEPATSGSETPGTSESATPESGPGTSTEPSEGSAPGTSTEPSEGSAPGTSTEPSEGSAPGTSTEPSEGSAPGTSTEPSEGSAPGTSTEPSEGSAPGSPAGSPTSTEEGTSTEPSEGSAPGTSESATPESGPGSEPATSGSETPGTSESATPESGPGSEPATSGSETPGTSESATPESGPGTSTEPSEGSAPGTSESATPESGPGSPAGSPTSTEEGSPAGSPTSTEEGSPAGSPTSTEEGTSESATPESGPGTSTEPSEGSAPGTSESATPESGPGSEPATSGSETPGTSESATPESGPGSEPATSGSETPGTSESATPESGPGTSTEPSEGSAPGSPAGSPTSTEEGTSESATPESGPGSEPATSGSETPGTSESATPESGPGSPAGSPTSTEEGSPAGSPTSTEEGTSTEPSEGSAPGTSESATPESGPGTSESATPESGPGTSESATPESGPGSEPATSGSETPGSEPATSGSETPGSPAGSPTSTEEGTSTEPSEGSAPGTSTEPSEGSAPGSEPATS

SEQ ID NO: 132 - protein, 720 aa, Artificial Sequence
  Description of Artificial Sequence: Synthetic polypeptide
TSGSETPGSEPATSGSETPGSPAGSPTSTEEGTSESATPESGPGTSTEPSEGSAPGTSTEPSEGSAPGSPAGSPTSTEEGTSTEPSEGSAPGTSTEPSEGSAPGTSESATPESGPGTSTEPSEGSAPGTSESATPESGPGSEPATSGSETPGTSTEPSEGSAPGTSTEPSEGSAPGTSESATPESGPGTSESATPESGPGSPAGSPTSTEEGTSESATPESGPGSEPATSGSETPGTSESATPESGPGTSTEPSEGSAPGTSTEPSEGSAPGTSTEPSEGSAPGTSTEPSEGSAPGTSTEPSEGSAPGTSTEPSEGSAPGSPAGSPTSTEEGTSTEPSEGSAPGTSESATPESGPGSEPATSGSETPGTSESATPESGPGSEPATSGSETPGTSESATPESGPGTSTEPSEGSAPGTSESATPESGPGSPAGSPTSTEEGSPAGSPTSTEEGSPAGSPTSTEEGTSESATPESGPGTSTEPSEGSAPGTSESATPESGPGSEPATSGSETPGTSESATPESGPGSEPATSGSETPGTSESATPESGPGTSTEPSEGSAPGSPAGSPTSTEEGTSESATPESGPGSEPATSGSETPGTSESATPESGPGSPAGSPTSTEEGSPAGSPTSTEEGTSTEPSEGSAPGTSESATPESGPGTSESATPESGPGTSESATPESGPGSEPATSGSETPGSEPATSGSETPGSPAGSPTSTEEGTSTE

SEQ ID NO: 133 - protein, 756 aa, Artificial Sequence
  Description of Artificial Sequence: Synthetic polypeptide
TSGSETPGSEPATSGSETPGSPAGSPTSTEEGTSESATPESGPGTSTEPSEGSAPGTSTEPSEGSAPGSPAGSPTSTEEGTSTEPSEGSAPGTSTEPSEGSAPGTSESATPESGPGTSTEPSEGSAPGTSESATPESGPGSEPATSGSETPGTSTEPSEGSAPGTSTEPSEGSAPGTSESATPESGPGTSESATPESGPGSPAGSPTSTEEGTSESATPESGPGSEPATSGSETPGTSESATPESGPGTSTEPSEGSAPGTSTEPSEGSAPGTSTEPSEGSAPGTSTEPSEGSAPGTSTEPSEGSAPGTSTEPSEGSAPGSPAGSPTSTEEGTSTEPSEGSAPGTSESATPESGPGSEPATSGSETPGTSESATPESGPGSEPATSGSETPGTSESATPESGPGTSTEPSEGSAPGTSESATPESGPGSPAGSPTSTEEGSPAGSPTSTEEGSPAGSPTSTEEGTSESATPESGPGTSTEPSEGSAPGTSESATPESGPGSEPATSGSETPGTSESATPESGPGSEPATSGSETPGTSESATPESGPGTSTEPSEGSAPGSPAGSPTSTEEGTSESATPESGPGSEPATSGSETPGTSESATPESGPGSPAGSPTSTEEGSPAGSPTSTEEGTSTEPSEGSAPGTSESATPESGPGTSESATPESGPGTSESATPESGPGSEPATSGSETPGSEPATSGSETPGSPAGSPTSTEEGTSTEPSEGSAPGTSTEPSEGSAPGSEPATSGSETPGTSES

SEQ ID NO: 134 - protein, 792 aa, Artificial Sequence
  Description of Artificial Sequence: Synthetic polypeptide
EGSAPGTSESATPESGPGSEPATSGSETPGSEPATSGSETPGSPAGSPTSTEEGTSESATPESGPGTSTEPSEGSAPGTSTEPSEGSAPGSPAGSPTSTEEGTSTEPSEGSAPGTSTEPSEGSAPGTSESATPESGPGTSTEPSEGSAPGTSESATPESGPGSEPATSGSETPGTSTEPSEGSAPGTSTEPSEGSAPGTSESATPESGPGTSESATPESGPGSPAGSPTSTEEGTSESATPESGPGSEPATSGSETPGTSESATPESGPGTSTEPSEGSAPGTSTEPSEGSAPGTSTEPSEGSAPGTSTEPSEGSAPGTSTEPSEGSAPGTSTEPSEGSAPGSPAGSPTSTEEGTSTEPSEGSAPGTSESATPESGPGSEPATSGSETPGTSESATPESGPGSEPATSGSETPGTSESATPESGPGTSTEPSEGSAPGTSESATPESGPGSPAGSPTSTEEGSPAGSPTSTEEGSPAGSPTSTEEGTSESATPESGPGTSTEPSEGSAPGTSESATPESGPGSEPATSGSETPGTSESATPESGPGSEPATSGSETPGTSESATPESGPGTSTEPSEGSAPGSPAGSPTSTEEGTSESATPESGPGSEPATSGSETPGTSESATPESGPGSPAGSPTSTEEGSPAGSPTSTEEGTSTEPSEGSAPGTSESATPESGPGTSESATPESGPGTSESATPESGPGSEPATSGSETPGSEPATSGSETPGSPAGSPTSTEEGTSTEPSEGSAPGTSTEPSEGSAPGSEPATSGSETPGTSESATPESGPGTSTEPS

SEQ ID NO: 135 - protein, 828 aa, Artificial Sequence
  Description of Artificial Sequence: Synthetic polypeptide
PESGPGTSTEPSEGSAPGSPAGSPTSTEEGTSTEPSEGSAPGTSTEPSEGSAPGTSESATPESGPGSEPATSGSETPGSEPATSGSETPGSPAGSPTSTEEGTSESATPESGPGTSTEPSEGSAPGTSTEPSEGSAPGSPAGSPTSTEEGTSTEPSEGSAPGTSTEPSEGSAPGTSESATPESGPGTSTEPSEGSAPGTSESATPESGPGSEPATSGSETPGTSTEPSEGSAPGTSTEPSEGSAPGTSESATPESGPGTSESATPESGPGSPAGSPTSTEEGTSESATPESGPGSEPATSGSETPGTSESATPESGPGTSTEPSEGSAPGTSTEPSEGSAPGTSTEPSEGSAPGTSTEPSEGSAPGTSTEPSEGSAPGTSTEPSEGSAPGSPAGSPTSTEEGTSTEPSEGSAPGTSESATPESGPGSEPATSGSETPGTSESATPESGPGSEPATSGSETPGTSESATPESGPGTSTEPSEGSAPGTSESATPESGPGSPAGSPTSTEEGSPAGSPTSTEEGSPAGSPTSTEEGTSESATPESGPGTSTEPSEGSAPGTSESATPESGPGSEPATSGSETPGTSESATPESGPGSEPATSGSETPGTSESATPESGPGTSTEPSEGSAPGSPAGSPTSTEEGTSESATPESGPGSEPATSGSETPGTSESATPESGPGSPAGSPTSTEEGSPAGSPTSTEEGTSTEPSEGSAPGTSESATPESGPGTSESATPESGPGTSESATPESGPGSEPATSGSETPGSEPATSGSETPGSPAGSPTSTEEGTSTEPSEGSAPGTSTEPSEGSAPGSEPATSGSETPGTSESAT

SEQ ID NO: 136 - protein, 72 aa, Artificial Sequence
  Description of Artificial Sequence: Synthetic polypeptide
GPGSSPSASTGTGPGTPGSGTASSSPGSSTPSGATGSPGSSPSASTGTGPGASPGTSSTGSPGTPGSGTASS

SEQ ID NO: 137 - protein, 72 aa, Artificial Sequence
  Description of Artificial Sequence: Synthetic polypeptide
GSSTPSGATGSPGSSTPSGATGSPGSSPSASTGTGPGSSPSASTGTGPGASPGTSSTGSPGTPGSGTASSSP

SEQ ID NO: 138 - protein, 72 aa, Artificial Sequence
  Description of Artificial Sequence: Synthetic polypeptide
SPSASTGTGPGASPGTSSTGSPGSSPSASTGTGPGTPGSGTASSSPGSSTPSGATGSPGSSTPSGATGSPGA

SEQ ID NO: 139 - protein, 108 aa, Artificial Sequence
  Description of Artificial Sequence: Synthetic polypeptide
SASTGTGPGSSPSASTGTGPGTPGSGTASSSPGSSTPSGATGSPGSSPSASTGTGPGASPGTSSTGSPGTPGSGTASSSPGSSTPSGATGSPGTPGSGTASSSPGASP

SEQ ID NO: 140 - protein, 108 aa, Artificial Sequence
  Description of Artificial Sequence: Synthetic polypeptide
PGTPGSGTASSSPGSSTPSGATGSPGTPGSGTASSSPGSSTPSGATGSPGSSTPSGATGSPGSSPSASTGTGPGSSPSASTGTGPGASPGTSSTGSPGTPGSGTASSS

SEQ ID NO: 141 - protein, 144 aa, Artificial Sequence; identical to SEQ ID NO: 62
  Description of Artificial Sequence: Synthetic polypeptide

SEQ ID NO: 142 - protein, 144 aa, Artificial Sequence
  Description of Artificial Sequence: Synthetic polypeptide
PSGATGSPGTPGSGTASSSPGSSTPSGATGSPGSSTPSGATGSPGSSPSASTGTGPGSSPSASTGTGPGASPGTSSTGSPGTPGSGTASSSPGSSTPSGATGSPGSSPSASTGTGPGSSPSASTGTGPGASPGTSSTGSPGASP

SEQ ID NO: 143 - protein, 180 aa, Artificial Sequence
  Description of Artificial Sequence: Synthetic polypeptide
TSSTGSPGSSPSASTGTGPGSSPSASTGTGPGTPGSGTASSSPGSSTPSGATGSPGSSPSASTGTGPGASPGTSSTGSPGTPGSGTASSSPGSSTPSGATGSPGTPGSGTASSSPGASPGTSSTGSPGASPGTSSTGSPGTPGSGTASSSPGSSTPSGATGSPGASPGTSSTGSPGTPGS

SEQ ID NO: 144 - protein, 216 aa, Artificial Sequence
  Description of Artificial Sequence: Synthetic polypeptide
TGTGPGSSPSASTGTGPGTPGSGTASSSPGSSTPSGATGSPGSSPSASTGTGPGASPGTSSTGSPGTPGSGTASSSPGSSTPSGATGSPGTPGSGTASSSPGASPGTSSTGSPGASPGTSSTGSPGTPGSGTASSSPGSSTPSGATGSPGASPGTSSTGSPGTPGSGTASSSPGSSTPSGATGSPGSSPSASTGTGPGSSPSASTGTGPGSSTPSG

SEQ ID NO: 145 - protein, 252 aa, Artificial Sequence
  Description of Artificial Sequence: Synthetic polypeptide
TSSTGSPGSSPSASTGTGPGSSPSASTGTGPGTPGSGTASSSPGSSTPSGATGSPGSSPSASTGTGPGASPGTSSTGSPGTPGSGTASSSPGSSTPSGATGSPGTPGSGTASSSPGASPGTSSTGSPGASPGTSSTGSPGTPGSGTASSSPGSSTPSGATGSPGASPGTSSTGSPGTPGSGTASSSPGSSTPSGATGSPGSSPSASTGTGPGSSPSASTGTGPGSSTPSGATGSPGSSTPSGATGSPGASPG

SEQ ID NO: 146 - protein, 288 aa, Artificial Sequence
  Description of Artificial Sequence: Synthetic polypeptide
TSSTGSPGSSPSASTGTGPGSSPSASTGTGPGTPGSGTASSSPGSSTPSGATGSPGSSPSASTGTGPGASPGTSSTGSPGTPGSGTASSSPGSSTPSGATGSPGTPGSGTASSSPGASPGTSSTGSPGASPGTSSTGSPGTPGSGTASSSPGSSTPSGATGSPGASPGTSSTGSPGTPGSGTASSSPGSSTPSGATGSPGSSPSASTGTGPGSSPSASTGTGPGSSTPSGATGSPGSSTPSGATGSPGASPGTSSTGSPGASPGTSSTGSPGASPGTSSTGSPGTPGS

SEQ ID NO: 147 - protein, 324 aa, Artificial Sequence
  Description of Artificial Sequence: Synthetic polypeptide
TSSTGSPGTPGSGTASSSPGASPGTSSTGSPGASPGTSSTGSPGASPGTSSTGSPGASPGTSSTGSPGTPGSGTASSSPGSSTPSGATGSPGTPGSGTASSSPGSSTPSGATGSPGTPGSGTASSSPGSSTPSGATGSPGSSTPSGATGSPGSSPSASTGTGPGSSPSASTGTGPGASPGTSSTGSPGTPGSGTASSSPGSSTPSGATGSPGSSPSASTGTGPGSSPSASTGTGPGASPGTSSTGSPGASPGTSSTGSPGSSTPSGATGSPGSSPSASTGTGPGASPGTSSTGSPGSSPSASTGTGPGTPGSGTASSSPGSSTP

SEQ ID NO: 148 - protein, 360 aa, Artificial Sequence
  Description of Artificial Sequence: Synthetic polypeptide
TSSTGSPGASPGTSSTGSPGTPGSGTASSSPGASPGTSSTGSPGASPGTSSTGSPGASPGTSSTGSPGASPGTSSTGSPGTPGSGTASSSPGSSTPSGATGSPGTPGSGTASSSPGSSTPSGATGSPGTPGSGTASSSPGSSTPSGATGSPGSSTPSGATGSPGSSPSASTGTGPGSSPSASTGTGPGASPGTSSTGSPGTPGSGTASSSPGSSTPSGATGSPGSSPSASTGTGPGSSPSASTGTGPGASPGTSSTGSPGASPGTSSTGSPGSSTPSGATGSPGSSPSASTGTGPGASPGTSSTGSPGSSPSASTGTGPGTPGSGTASSSPGSSTPSGATGSPGSSTPSGATGSPGASPG

SEQ ID NO: 149 - protein, 396 aa, Artificial Sequence
  Description of Artificial Sequence: Synthetic polypeptide
GATGSPGSSTPSGATGSPGSSPSASTGTGPGASPGTSSTGSPGASPGTSSTGSPGTPGSGTASSSPGASPGTSSTGSPGASPGTSSTGSPGASPGTSSTGSPGASPGTSSTGSPGTPGSGTASSSPGSSTPSGATGSPGTPGSGTASSSPGSSTPSGATGSPGTPGSGTASSSPGSSTPSGATGSPGSSTPSGATGSPGSSPSASTGTGPGSSPSASTGTGPGASPGTSSTGSPGTPGSGTASSSPGSSTPSGATGSPGSSPSASTGTGPGSSPSASTGTGPGASPGTSSTGSPGASPGTSSTGSPGSSTPSGATGSPGSSPSASTGTGPGASPGTSSTGSPGSSPSASTGTGPGTPGSGTASSSPGSSTPSGATGSPGSSTPSGATGSPGASPGT

SEQ ID NO: 150 - protein, 432 aa, Artificial Sequence
  Description of Artificial Sequence: Synthetic polypeptide
GATGSPGSSTPSGATGSPGASPGTSSTGSPGTPGSGTASSSPGSSTPSGATGSPGSSTPSGATGSPGSSTPSGATGSPGSSPSASTGTGPGASPGTSSTGSPGASPGTSSTGSPGTPGSGTASSSPGASPGTSSTGSPGASPGTSSTGSPGASPGTSSTGSPGASPGTSSTGSPGTPGSGTASSSPGSSTPSGATGSPGTPGSGTASSSPGSSTPSGATGSPGTPGSGTASSSPGSSTPSGATGSPGSSTPSGATGSPGSSPSASTGTGPGSSPSASTGTGPGASPGTSSTGSPGTPGSGTASSSPGSSTPSGATGSPGSSPSASTGTGPGSSPSASTGTGPGASPGTSSTGSPGASPGTSSTGSPGSSTPSGATGSPGSSPSASTGTGPGASPGTSSTGSPGSSPSASTGTGPGTPGSGTASSSPGSSTPS

SEQ ID NO: 151 - protein, 468 aa, Artificial Sequence
  Description of Artificial Sequence: Synthetic polypeptide
TSSTGSPGSSPSASTGTGPGTPGSGTASSSPGASPGTSSTGSPGASPGTSSTGSPGASPGTSSTGSPGSSTPSGATGSPGSSTPSGATGSPGASPGTSSTGSPGTPGSGTASSSPGSSTPSGATGSPGSSTPSGATGSPGSSTPSGATGSPGSSPSASTGTGPGASPGTSSTGSPGASPGTSSTGSPGTPGSGTASSSPGASPGTSSTGSPGASPGTSSTGSPGASPGTSSTGSPGASPGTSSTGSPGTPGSGTASSSPGSSTPSGATGSPGTPGSGTASSSPGSSTPSGATGSPGTPGSGTASSSPGSSTPSGATGSPGSSTPSGATGSPGSSPSASTGTGPGSSPSASTGTGPGASPGTSSTGSPGTPGSGTASSSPGSSTPSGATGSPGSSPSASTGTGPGSSPSASTGTGPGASPGTSSTGSPGASPGTSSTGSPGSSTPSGATGSPGSSPSASTGTGPGASPG

SEQ ID NO: 152 - protein, 504 aa, Artificial Sequence
  Description of Artificial Sequence: Synthetic polypeptide
TSSTGSPGSSPSASTGTGPGTPGSGTASSSPGASPGTSSTGSPGASPGTSSTGSPGASPGTSSTGSPGSSTPSGATGSPGSSTPSGATGSPGASPGTSSTGSPGTPGSGTASSSPGSSTPSGATGSPGSSTPSGATGSPGSSTPSGATGSPGSSPSASTGTGPGASPGTSSTGSPGASPGTSSTGSPGTPGSGTASSSPGASPGTSSTGSPGASPGTSSTGSPGASPGTSSTGSPGASPGTSSTGSPGTPGSGTASSSPGSSTPSGATGSPGTPGSGTASSSPGSSTPSGATGSPGTPGSGTASSSPGSSTPSGATGSPGSSTPSGATGSPGSSPSASTGTGPGSSPSASTGTGPGASPGTSSTGSPGTPGSGTASSSPGSSTPSGATGSPGSSPSASTGTGPGSSPSASTGTGPGASPGTSSTGSPGASPGTSSTGSPGSSTPSGATGSPGSSPSASTGTGPGASPGTSSTGSPGSSPSASTGTGPGTPGSGTASSSPGSSTP

SEQ ID NO: 153 - protein, 540 aa, Artificial Sequence
  Description of Artificial Sequence: Synthetic polypeptide
TSSTGSPGASPGTSSTGSPGSSPSASTGTGPGTPGSGTASSSPGASPGTSSTGSPGASPGTSSTGSPGASPGTSSTGSPGSSTPSGATGSPGSSTPSGATGSPGASPGTSSTGSPGTPGSGTASSSPGSSTPSGATGSPGSSTPSGATGSPGSSTPSGATGSPGSSPSASTGTGPGASPGTSSTGSPGASPGTSSTGSPGTPGSGTASSSPGASPGTSSTGSPGASPGTSSTGSPGASPGTSSTGSPGASPGTSSTGSPGTPGSGTASSSPGSSTPSGATGSPGTPGSGTASSSPGSSTPSGATGSPGTPGSGTASSSPGSSTPSGATGSPGSSTPSGATGSPGSSPSASTGTGPGSSPSASTGTGPGASPGTSSTGSPGTPGSGTASSSPGSSTPSGATGSPGSSPSASTGTGPGSSPSASTGTGPGASPGTSSTGSPGASPGTSSTGSPGSSTPSGATGSPGSSPSASTGTGPGASPGTSSTGSPGSSPSASTGTGPGTPGSGTASSSPGSSTPSGATGSPGSSTPSGATGSPGASPG

SEQ ID NO: 154 - protein, 576 aa, Artificial Sequence
  Description of Artificial Sequence: Synthetic polypeptide
TSSTGSPGTPGSGTASSSPGASPGTSSTGSPGASPGTSSTGSPGASPGTSSTGSPGSSPSASTGTGPGTPGSGTASSSPGASPGTSSTGSPGASPGTSSTGSPGASPGTSSTGSPGSSTPSGATGSPGSSTPSGATGSPGASPGTSSTGSPGTPGSGTASSSPGSSTPSGATGSPGSSTPSGATGSPGSSTPSGATGSPGSSPSASTGTGPGASPGTSSTGSPGASPGTSSTGSPGTPGSGTASSSPGASPGTSSTGSPGASPGTSSTGSPGASPGTSSTGSPGASPGTSSTGSPGTPGSGTASSSPGSSTPSGATGSPGTPGSGTASSSPGSSTPSGATGSPGTPGSGTASSSPGSSTPSGATGSPGSSTPSGATGSPGSSPSASTGTGPGSSPSASTGTGPGASPGTSSTGSPGTPGSGTASSSPGSSTPSGATGSPGSSPSASTGTGPGSSPSASTGTGPGASPGTSSTGSPGASPGTSSTGSPGSSTPSGATGSPGSSPSASTGTGPGASPGTSSTGSPGSSPSASTGTGPGTPGSGTASSSPGSSTPSGATGSPGSSTPSGATGSPGASPG

SEQ ID NO: 155 - protein, 612 aa, Artificial Sequence
  Description of Artificial Sequence: Synthetic polypeptide
STGSPGTPGSGTASSSPGSSTPSGATGSPGASPGTSSTGSPGTPGSGTASSSPGSSTPSGATGSPGSSPSASTGTGPGSSPSASTGTGPGSSTPSGATGSPGSSTPSGATGSPGASPGTSSTGSPGASPGTSSTGSPGASPGTSSTGSPGTPGSGTASSSPGASPGTSSTGSPGASPGTSSTGSPGASPGTSSTGSPGSSPSASTGTGPGTPGSGTASSSPGASPGTSSTGSPGASPGTSSTGSPGASPGTSSTGSPGSSTPSGATGSPGSSTPSGATGSPGASPGTSSTGSPGTPGSGTASSSPGSSTPSGATGSPGSSTPSGATGSPGSSTPSGATGSPGSSPSASTGTGPGASPGTSSTGSPGASPGTSSTGSPGTPGSGTASSSPGASPGTSSTGSPGASPGTSSTGSPGASPGTSSTGSPGASPGTSSTGSPGTPGSGTASSSPGSSTPSGATGSPGTPGSGTASSSPGSSTPSGATGSPGTPGSGTASSSPGSSTPSGATGSPGSSTPSGATGSPGSSPSASTGTGPGSSPSASTGTGPGASPGTSSTGSPGTPGSGTASSSPGSSTPSGATGSPGSSPSASTGTGPGSSPSASTGTGPGASPGTS

SEQ ID NO: 156 - protein, 648 aa, Artificial Sequence
  Description of Artificial Sequence: Synthetic polypeptide
GTASSSPGSSTPSGATGSPGSSPSASTGTGPGSSPSASTGTGPGSSTPSGATGSPGSSTPSGATGSPGASPGTSSTGSPGASPGTSSTGSPGASPGTSSTGSPGTPGSGTASSSPGASPGTSSTGSPGASPGTSSTGSPGASPGTSSTGSPGSSPSASTGTGPGTPGSGTASSSPGASPGTSSTGSPGASPGTSSTGSPGASPGTSSTGSPGSSTPSGATGSPGSSTPSGATGSPGASPGTSSTGSPGTPGSGTASSSPGSSTPSGATGSPGSSTPSGATGSPGSSTPSGATGSPGSSPSASTGTGPGASPGTSSTGSPGASPGTSSTGSPGTPGSGTASSSPGASPGTSSTGSPGASPGTSSTGSPGASPGTSSTGSPGASPGTSSTGSPGTPGSGTASSSPGSSTPSGATGSPGTPGSGTASSSPGSSTPSGATGSPGTPGSGTASSSPGSSTPSGATGSPGSSTPSGATGSPGSSPSASTGTGPGSSPSASTGTGPGASPGTSSTGSPGTPGSGTASSSPGSSTPSGATGSPGSSPSASTGTGPGSSPSASTGTGPGASPGTSSTGSPGASPGTSSTGSPGSSTPSGATGSPGSSPSASTGTGPGASPGTSSTGSPGSSPSASTGTGPGTPGSGTASSSPGSSTP

SEQ ID NO: 157 - protein, 684 aa, Artificial Sequence
  Description of Artificial Sequence: Synthetic polypeptide
TSSTGSPGTPGSGTASSSPGSSTPSGATGSPGSSPSASTGTGPGSSPSASTGTGPGSSTPSGATGSPGSSTPSGATGSPGASPGTSSTGSPGASPGTSSTGSPGASPGTSSTGSPGTPGSGTASSSPGASPGTSSTGSPGASPGTSSTGSPGASPGTSSTGSPGSSPSASTGTGPGTPGSGTASSSPGASPGTSSTGSPGASPGTSSTGSPGASPGTSSTGSPGSSTPSGATGSPGSSTPSGATGSPGASPGTSSTGSPGTPGSGTASSSPGSSTPSGATGSPGSSTPSGATGSPGSSTPSGATGSPGSSPSASTGTGPGASPGTSSTGSPGASPGTSSTGSPGTPGSGTASSSPGASPGTSSTGSPGASPGTSSTGSPGASPGTSSTGSPGASPGTSSTGSPGTPGSGTASSSPGSSTPSGATGSPGTPGSGTASSSPGSSTPSGATGSPGTPGSGTASSSPGSSTPSGATGSPGSSTPSGATGSPGSSPSASTGTGPGSSPSASTGTGPGASPGTSSTGSPGTPGSGTASSSPGSSTPSGATGSPGSSPSASTGTGPGSSPSASTGTGPGASPGTSSTGSPGASPGTSSTGSPGSSTPSGATGSPGSSPSASTGTGPGASPGTSSTGSPGSSPSASTGTGPGTPGSGTASSSPGSSTPSGATGSPGSSTPSGATGSPGASPG

SEQ ID NO: 158 - protein, 720 aa, Artificial Sequence
  Description of Artificial Sequence: Synthetic polypeptide
TSSTGSPGTPGSGTASSSPGSSTPSGATGSPGASPGTSSTGSPGTPGSGTASSSPGSSTPSGATGSPGSSPSASTGTGPGSSPSASTGTGPGSSTPSGATGSPGSSTPSGATGSPGASPGTSSTGSPGASPGTSSTGSPGASPGTSSTGSPGTPGSGTASSSPGASPGTSSTGSPGASPGTSSTGSPGASPGTSSTGSPGSSPSASTGTGPGTPGSGTASSSPGASPGTSSTGSPGASPGTSSTGSPGASPGTSSTGSPGSSTPSGATGSPGSSTPSGATGSPGASPGTSSTGSPGTPGSGTASSSPGSSTPSGATGSPGSSTPSGATGSPGSSTPSGATGSPGSSPSASTGTGPGASPGTSSTGSPGASPGTSSTGSPGTPGSGTASSSPGASPGTSSTGSPGASPGTSSTGSPGASPGTSSTGSPGASPGTSSTGSPGTPGSGTASSSPGSSTPSGATGSPGTPGSGTASSSPGSSTPSGATGSPGTPGSGTASSSPGSSTPSGATGSPGSSTPSGATGSPGSSPSASTGTGPGSSPSASTGTGPGASPGTSSTGSPGTPGSGTASSSPGSSTPSGATGSPGSSPSASTGTGPGSSPSASTGTGPGASPGTSSTGSPGASPGTSSTGSPGSSTPSGATGSPGSSPSASTGTGPGASPGTSSTGSPGSSPSASTGTGPGTPGSGTASSSPGSSTPSGATGSPGSSTPSGATGSPGASPG

SEQ ID NO: 159 - protein, 756 aa, Artificial Sequence
  Description of Artificial Sequence: Synthetic polypeptide
TSSTGSPGSSPSASTGTGPGSSPSASTGTGPGTPGSGTASSSPGSSTPSGATGSPGSSPSASTGTGPGASPGTSSTGSPGTPGSGTASSSPGSSTPSGATGSPGTPGSGTASSSPGASPGTSSTGSPGASPGTSSTGSPGTPGSGTASSSPGSSTPSGATGSPGASPGTSSTGSPGTPGSGTASSSPGSSTPSGATGSPGSSPSASTGTGPGSSPSASTGTGPGSSTPSGATGSPGSSTPSGATGSPGASPGTSSTGSPGASPGTSSTGSPGASPGTSSTGSPGTPGSGTASSSPGASPGTSSTGSPGASPGTSSTGSPGASPGTSSTGSPGSSPSASTGTGPGTPGSGTASSSPGASPGTSSTGSPGASPGTSSTGSPGASPGTSSTGSPGSSTPSGATGSPGSSTPSGATGSPGASPGTSSTGSPGTPGSGTASSSPGSSTPSGATGSPGSSTPSGATGSPGSSTPSGATGSPGSSPSASTGTGPGASPGTSSTGSPGASPGTSSTGSPGTPGSGTASSSPGASPGTSSTGSPGASPGTSSTGSPGASPGTSSTGSPGASPGTSSTGSPGTPGSGTASSSPGSSTPSGATGSPGTPGSGTASSSPGSSTPSGATGSPGTPGSGTASSSPGSSTPSGATGSPGSSTPSGATGSPGSSPSASTGTGPGSSPSASTGTGPGASPGTSSTGSPGTPGSGTASSSPGSSTPSGATGSPGSSPSASTGTGPGSSPSASTGTGPGASPGTSSTGSPGASPG

SEQ ID NO: 160 - protein, 792 aa, Artificial Sequence
  Description of Artificial Sequence: Synthetic polypeptide
TSSTGSPGSSPSASTGTGPGSSPSASTGTGPGTPGSGTASSSPGSSTPSGATGSPGSSPSASTGTGPGASPGTSSTGSPGTPGSGTASSSPGSSTPSGATGSPGTPGSGTASSSPGASPGTSSTGSPGASPGTSSTGSPGTPGSGTASSSPGSSTPSGATGSPGASPGTSSTGSPGTPGSGTASSSPGSSTPSGATGSPGSSPSASTGTGPGSSPSASTGTGPGSSTPSGATGSPGSSTPSGATGSPGASPGTSSTGSPGASPGTSSTGSPGASPGTSSTGSPGTPGSGTASSSPGASPGTSSTGSPGASPGTSSTGSPGASPGTSSTGSPGSSPSASTGTGPGTPGSGTASSSPGASPGTSSTGSPGASPGTSSTGSPGASPGTSSTGSPGSSTPSGATGSPGSSTPSGATGSPGASPGTSSTGSPGTPGSGTASSSPGSSTPSGATGSPGSSTPSGATGSPGSSTPSGATGSPGSSPSASTGTGPGASPGTSSTGSPGASPGTSSTGSPGTPGSGTASSSPGASPGTSSTGSPGASPGTSSTGSPGASPGTSSTGSPGASPGTSSTGSPGTPGSGTASSSPGSSTPSGATGSPGTPGSGTASSSPGSSTPSGATGSPGTPGSGTASSSPGSSTPSGATGSPGSSTPSGATGSPGSSPSASTGTGPGSSPSASTGTGPGASPGTSSTGSPGTPGSGTASSSPGSSTPSGATGSPGSSPSASTGTGPGSSPSASTGTGPGASPGTSSTGSPGASPGTSSTGSPGSSTPSGATGSPGSSPSASTGTGPGASPG

SEQ ID NO: 161 - protein, 828 aa, Artificial Sequence
  Description of Artificial Sequence: Synthetic polypeptide
TSSTGSPGSSPSASTGTGPGSSPSASTGTGPGTPGSGTASSSPGSSTPSGATGSPGSSPSASTGTGPGASPGTSSTGSPGTPGSGTASSSPGSSTPSGATGSPGTPGSGTASSSPGASPGTSSTGSPGASPGTSSTGSPGTPGSGTASSSPGSSTPSGATGSPGASPGTSSTGSPGTPGSGTASSSPGSSTPSGATGSPGSSPSASTGTGPGSSPSASTGTGPGSSTPSGATGSPGSSTPSGATGSPGASPGTSSTGSPGASPGTSSTGSPGASPGTSSTGSPGTPGSGTASSSPGASPGTSSTGSPGASPGTSSTGSPGASPGTSSTGSPGSSPSASTGTGPGTPGSGTASSSPGASPGTSSTGSPGASPGTSSTGSPGASPGTSSTGSPGSSTPSGATGSPGSSTPSGATGSPGASPGTSSTGSPGTPGSGTASSSPGSSTPSGATGSPGSSTPSGATGSPGSSTPSGATGSPGSSPSASTGTGPGASPGTSSTGSPGASPGTSSTGSPGTPGSGTASSSPGASPGTSSTGSPGASPGTSSTGSPGASPGTSSTGSPGASPGTSSTGSPGTPGSGTASSSPGSSTPSGATGSPGTPGSGTASSSPGSSTPSGATGSPGTPGSGTASSSPGSSTPSGATGSPGSSTPSGATGSPGSSPSASTGTGPGSSPSASTGTGPGASPGTSSTGSPGTPGSGTASSSPGSSTPSGATGSPGSSPSASTGTGPGSSPSASTGTGPGASPGTSSTGSPGASPGTSSTGSPGSSTPSGATGSPGSSPSASTGTGPGASPGTSSTGSPGSSPSASTGTGPGTPGSGTASSSPGSSTP

SEQ ID NO: 162 - protein, 10 aa, Artificial Sequence
  Description of Artificial Sequence: Synthetic peptide
GAGSPGAETA

SEQ ID NO: 163 - protein, 4 aa, Artificial Sequence
  Description of Artificial Sequence: Synthetic peptide
GSPG

SEQ ID NO: 164 - protein, 4 aa, Artificial Sequence
  Description of Artificial Sequence: Synthetic peptide
ETET

SEQ ID NO: 165 - protein, 5 aa, Artificial Sequence
  Description of Artificial Sequence: Synthetic peptide
PGSSS

SEQ ID NO: 166 - protein, 5 aa, Artificial Sequence
  Description of Artificial Sequence: Synthetic peptide
GPSGP

SEQ ID NO: 167 - protein, 8 aa, Artificial Sequence
  Description of Artificial Sequence: Synthetic peptide
LTPRSLLV

SEQ ID NO: 168 - protein, 7 aa, Artificial Sequence
  Description of Artificial Sequence: Synthetic peptide
KLTRAET

SEQ ID NO: 169 - protein, 7 aa, Artificial Sequence
  Description of Artificial Sequence: Synthetic peptide
DFTRVVG

SEQ ID NO: 170 - protein, 8 aa, Artificial Sequence
  Description of Artificial Sequence: Synthetic peptide
TMTRIVGG

SEQ ID NO: 171 - protein, 8 aa, Artificial Sequence
  Description of Artificial Sequence: Synthetic peptide
SPFRSTGG

SEQ ID NO: 172 - protein, 8 aa, Artificial Sequence
  Description of Artificial Sequence: Synthetic peptide
LQVRIVGG

SEQ ID NO: 173 - protein, 8 aa, Artificial Sequence
  Description of Artificial Sequence: Synthetic peptide
PLGRIVGG

SEQ ID NO: 174 - protein, 8 aa, Artificial Sequence
  Description of Artificial Sequence: Synthetic peptide
IEGRTVGG

SEQ ID NO: 175 - protein, 8 aa, Artificial Sequence
  Description of Artificial Sequence: Synthetic peptide
LTPRSLLV

SEQ ID NO: 176 - protein, 8 aa, Artificial Sequence
  Description of Artificial Sequence: Synthetic peptide
LGPVSGVP

SEQ ID NO: 177 - protein, 8 aa, Artificial Sequence
  Description of Artificial Sequence: Synthetic peptide
VAGDSLEE

SEQ ID NO: 178 - protein, 8 aa, Artificial Sequence
  Description of Artificial Sequence: Synthetic peptide
GPAGLGGA

SEQ ID NO: 179 - protein, 8 aa, Artificial Sequence
  Description of Artificial Sequence: Synthetic peptide
  MOD_RES (2)..(2): Pro or Ala
  MOD_RES (3)..(3): Any amino acid
  MOD_RES (6)..(6): Any amino acid
  MOD_RES (8)..(8): Any amino acid
GXXGLXGX

SEQ ID NO: 180 - protein, 8 aa, Artificial Sequence
  Description of Artificial Sequence: Synthetic peptide
GPAGLRGA

SEQ ID NO: 181 - protein, 8 aa, Artificial Sequence
  Description of Artificial Sequence: Synthetic peptide
  MOD_RES (3)..(3): Any amino acid
  MOD_RES (6)..(6): Any amino acid
  MOD_RES (7)..(7): Gly or Ala
  MOD_RES (8)..(8): Any amino acid
GPXGLXXX

SEQ ID NO: 182 - protein, 8 aa, Artificial Sequence
  Description of Artificial Sequence: Synthetic peptide
APLGLRLR

SEQ ID NO: 183 - protein, 8 aa, Artificial Sequence
  Description of Artificial Sequence: Synthetic peptide
PALPLVAQ

SEQ ID NO: 184 - protein, 7 aa, Artificial Sequence
  Description of Artificial Sequence: Synthetic peptide
ENLYFQG

SEQ ID NO: 185 - protein, 8 aa, Artificial Sequence
  Description of Artificial Sequence: Synthetic peptide
ENLYFQGS

SEQ ID NO: 186 - protein, 8 aa, Artificial Sequence
  Description of Artificial Sequence: Synthetic peptide
DDDKIVGG

SEQ ID NO: 187 - protein, 8 aa, Artificial Sequence
  Description of Artificial Sequence: Synthetic peptide
DDDKIVGG

SEQ ID NO: 188 - protein, 8 aa, Artificial Sequence
  Description of Artificial Sequence: Synthetic peptide
LEVLFQGP

SEQ ID NO: 189 - protein, 8 aa, Artificial Sequence
  Description of Artificial Sequence: Synthetic peptide
LEVLFQGP

SEQ ID NO: 190 - protein, 8 aa, Artificial Sequence
  Description of Artificial Sequence: Synthetic peptide
LPKTGSES

SEQ ID NO: 191 - protein, 8 aa, Artificial Sequence
  Description of Artificial Sequence: Synthetic peptide
  MOD_RES (3)..(3): Lys, Glu, Ala or Asp
  MOD_RES (6)..(6): Any amino acid
  MOD_RES (7)..(7): Glu, Lys or Ser
LPXTGXXS

SEQ ID NO: 192 - DNA, 144 bp, Artificial Sequence
  Description of Artificial Sequence: Synthetic polynucleotide
atggctgaacctgctggctctccaacctccactgaggaaggtaccccgggtagcggtactgcttcttcctctccaggtagctctaccccttctggtgcaaccggctctccaggtgcttctccgggcaccagctctaccggttct

SEQ ID NO: 193 - DNA, 144 bp, Artificial Sequence
  Description of Artificial Sequence: Synthetic polynucleotide
atggctgaacctgctggctctccaacctccactgaggaaggtgcatccccgggcaccagctctaccggttctccaggtagctctaccccgtctggtgctaccggctctccaggtagctctaccccgtctggtgctactggctct

SEQ ID NO: 194 - DNA, 432 bp, Artificial Sequence
  Description of Artificial Sequence: Synthetic polynucleotide
ggtagcgaaccggcaacttccggctctgaaaccccaggtacttctgaaagcgctactcctgagtctggcccaggtagcgaacctgctacctctggctctgaaaccccaggtagcccggcaggctctccgacttccaccgaggaaggtacctctactgaaccttctgagggtagcgctccaggtagcgaaccggcaacctctggctctgaaaccccaggtagcgaacctgctacctccggctctgaaactccaggtagcgaaccggctacttccggttctgaaactccaggtacctctaccgaaccttccgaaggcagcgcaccaggtacttctgaaagcgcaacccctgaatccggtccaggtagcgaaccggctacttctggctctgagactccaggtacttctaccgaaccgtccgaaggtagcgcacca

SEQ ID NO: 195 - DNA, 432 bp, Artificial Sequence
  Description of Artificial Sequence: Synthetic polynucleotide
ggtacttctactccggaaagcggttccgcatctccaggtacttctcctagcggtgaatcttctactgctccaggtacctctcctagcggcgaatcttctactgctccaggttctaccagctctaccgctgaatctcctggcccaggttctaccagcgaatccccgtctggcaccgcaccaggttctactagctctaccgcagaatctccgggtccaggtacttcccctagcggtgaatcttctactgctccaggtacctctactccggaaagcggctccgcatctccaggttctactagctctactgctgaatctcctggtccaggtacctcccctagcggcgaatcttctactgctccaggtacctctcctagcggcgaatcttctaccgctccaggtacctcccctagcggtgaatcttctaccgcacca

SEQ ID NO: 196 - DNA, 864 bp, Artificial Sequence
  Description of Artificial Sequence: Synthetic polynucleotide
ggtacctctgaaagcgcaactcctgagtctggcccaggtagcgaacctgctacctccggctctgagactccaggtacctctgaaagcgcaaccccggaatctggtccaggtagcgaacctgcaacctctggctctgaaaccccaggtacctctgaaagcgctactcctgaatctggcccaggtacttctactgaaccgtccgagggcagcgcaccaggtagccctgctggctctccaacctccaccgaagaaggtacctctgaaagcgcaacccctgaatccggcccaggtagcgaaccggcaacctccggttctgaaaccccaggtacttctgaaagcgctactcctgagtccggcccaggtagcccggctggctctccgacttccaccgaggaaggtagcccggctggctctccaacttctactgaagaaggtacttctaccgaaccttccgagggcagcgcaccaggtacttctgaaagcgctacccctgagtccggcccaggtacttctgaaagcgctactcctgaatccggtccaggtacttctgaaagcgctaccccggaatctggcccaggtagcgaaccggctacttctggttctgaaaccccaggtagcgaaccggctacctccggttctgaaactccaggtagcccagcaggctctccgacttccactgaggaaggtacttctactgaaccttccgaaggcagcgcaccaggtacctctactgaaccttctgagggcagcgctccaggtagcgaacctgcaacctctggctctgaaaccccaggtacctctgaaagcgctactcctgaatctggcccaggtacttctactgaaccgtccgagggcagcgcacca

SEQ ID NO: 197 - DNA, 1728 bp, Artificial Sequence
  Description of Artificial Sequence: Synthetic polynucleotide
ggtagcccggctggctctcctacctctactgaggaaggtacttctgaaagcgctactcctgagtctggtccaggtacctctactgaaccgtccgaaggtagcgctccaggtagcccagcaggctctccgacttccactgaggaaggtacttctactgaaccttccgaaggcagcgcaccaggtacctctactgaaccttctgagggcagcgctccaggtacttctgaaagcgctaccccggaatctggcccaggtagcgaaccggctacttctggttctgaaaccccaggtagcgaaccggctacctccggttctgaaactccaggtagcccggcaggctctccgacctctactgaggaaggtacttctgaaagcgcaaccccggagtccggcccaggtacctctaccgaaccgtctgagggcagcgcaccaggtacttctaccgaaccgtccgagggtagcgcaccaggtagcccagcaggttctcctacctccaccgaggaaggtacttctaccgaaccgtccgagggtagcgcaccaggtacctctactgaaccttctgagggcagcgctccaggtacttctgaaagcgctaccccggagtccggtccaggtacttctactgaaccgtccgaaggtagcgcaccaggtacttctgaaagcgcaacccctgaatccggtccaggtagcgaaccggctacttctggctctgagactccaggtacttctaccgaaccgtccgaaggtagcgcaccaggtacttctactgaaccgtctgaaggtagcgcaccaggtacttctgaaagcgcaaccccggaatccggcccaggtacctctgaaagcgcaaccccggagtccggcccaggtagccctgctggctctccaacctccaccgaagaaggtacctctgaaagcgcaacccctgaatccggcccaggtagcgaaccggcaacctccggttctgaaaccccaggtacctctgaaagcgctactccggagtctggcccaggtacctctactgaaccgtctgagggtagcgctccaggtacttctactgaaccgtccgaaggtagcgcaccaggtacttctaccgaaccgtccgaaggcagcgctccaggtacctctactgaaccttccgagggcagcgctccaggtacctctaccgaaccttctgaaggtagcgcaccaggtacttctaccgaaccgtccgagggtagcgcaccaggtagcccagcaggttctcctacctccaccgaggaaggtacttctaccgaaccgtccgagggtagcgcaccaggtacctctgaaagcgcaactcctgagtctggcccaggtagcgaacctgctacctccggctctgagactccaggtacctctgaaagcgcaaccccggaatctggtccaggtagcgaacctgcaacctctggctctgaaaccccaggtacctctgaaagcgctactcctgaatctggcccaggtacttctactgaaccgtccgagggcagcgcaccaggtacttctgaaagcgctactcctgagtccggcccaggtagcccggctggctctccgacttccaccgaggaaggtagcccggctggctctccaacttctactgaagaaggtagcccggcaggctctccgacctctactgaggaaggtacttctgaaagcgcaaccccggagtccggcccaggtacctctaccgaaccgtctgagggcagcgcacca

SEQ ID NO: 198 - DNA, 1728 bp, Artificial Sequence
  Description of Artificial Sequence: Synthetic polynucleotide
ggttctactagctctaccgctgaatctcctggcccaggttccactagctctaccgcagaatctccgggcccaggttctactagcgaatccccttctggtaccgctccaggttctactagctctaccgctgaatctccgggtccaggttctaccagctctactgcagaatctcctggcccaggtacttctactccggaaagcggttccgcttctccaggttctaccagcgaatctccttctggcaccgctccaggtacctctcctagcggcgaatcttctaccgctccaggttctactagcgaatctccttctggcactgcaccaggttctaccagcgaatctccttctggcaccgctccaggtacctctcctagcggcgaatcttctaccgctccaggttctactagcgaatctccttctggcactgcaccaggttctaccagcgaatctccttctggcaccgctccaggtacctctcctagcggcgaatcttctaccgctccaggttctactagcgaatctccttctggcactgcaccaggttctactagcgaatctccttctggcactgcaccaggttctaccagcgaatctccgtctggcactgcaccaggtacctctacccctgaaagcggttccgcttctccaggttctactagcgaatctccttctggtaccgctccaggtacttctacccctgaaagcggctccgcttctccaggttccactagctctaccgctgaatctccgggtccaggttctactagctctactgcagaatctcctggcccaggtacctctactccggaaagcggctctgcatctccaggtacttctacccctgaaagcggttctgcatctccaggttctactagcgaatccccgtctggtaccgcaccaggtacttctaccccggaaagcggctctgcttctccaggtacttctaccccggaaagcggctccgcatctccaggttctactagcgaatctccttctggtaccgctccaggttctaccagcgaatccccgtctggtactgctccaggttctaccagcgaatctccttctggtactgcaccaggttctactagctctactgcagaatctcctggcccaggtacctctactccggaaagcggctctgcatctccaggtacttctacccctgaaagcggttctgcatctccaggttctactagcgaatctccttctggcactgcaccaggttctaccagcgaatctccgtctggcactgcaccaggtacctctacccctgaaagcggttccgcttctccaggttctactagcgaatctccttctggcactgcaccaggttctaccagcgaatctccgtctggcactgcaccaggtacctctacccctgaaagcggttccgcttctccaggtacttctccgagcggtgaatcttctaccgcaccaggttctactagctctaccgctgaatctccgggcccaggtacttctccgagcggtgaatcttctactgctccaggttccactagctctactgctgaatctcctggcccaggtacttctactccggaaagcggttccgcttctccaggttctactagcgaatctccgtctggcaccgcaccaggttctactagctctactgcagaatctcctggcccaggtacctctactccggaaagcggctctgcatctccaggtacttctacccctgaaagcggttctgcatctcca

SEQ ID NO: 199 - DNA, 1875 bp, Artificial Sequence
  Description of Artificial Sequence: Synthetic polynucleotide
atggctgaacctgctggctctccaacctccactgaggaaggtaccccgggtagcggtactgcttcttcctctccaggtagctctaccccttctggtgcaaccggctctccaggtgcttctccgggcaccagctctaccggttctccaggtagcccggctggctctcctacctctactgaggaaggtacttctgaaagcgctactcctgagtctggtccaggtacctctactgaaccgtccgaaggtagcgctccaggtagcccagcaggctctccgacttccactgaggaaggtacttctactgaaccttccgaaggcagcgcaccaggtacctctactgaaccttctgagggcagcgctccaggtacttctgaaagcgctaccccggaatctggcccaggtagcgaaccggctacttctggttctgaaaccccaggtagcgaaccggctacctccggttctgaaactccaggtagcccggcaggctctccgacctctactgaggaaggtacttctgaaagcgcaaccccggagtccggcccaggtacctctaccgaaccgtctgagggcagcgcaccaggtacttctaccgaaccgtccgagggtagcgcaccaggtagcccagcaggttctcctacctccaccgaggaaggtacttctaccgaaccgtccgagggtagcgcaccaggtacctctactgaaccttctgagggcagcgctccaggtacttctgaaagcgctaccccggagtccggtccaggtacttctactgaaccgtccgaaggtagcgcaccaggtacttctgaaagcgcaacccctgaatccggtccaggtagcgaaccggctacttctggctctgagactccaggtacttctaccgaaccgtccgaaggtagcgcaccaggtacttctactgaaccgtctgaaggtagcgcaccaggtacttctgaaagcgcaaccccggaatccggcccaggtacctctgaaagcgcaaccccggagtccggcccaggtagccctgctggctctccaacctccaccgaagaaggtacctctgaaagcgcaacccctgaatccggcccaggtagcgaaccggcaacctccggttctgaaaccccaggtacctctgaaagcgctactccggagtctggcccaggtacctctactgaaccgtctgagggtagcgctccaggtacttctactgaaccgtccgaaggtagcgcaccaggtacttctaccgaaccgtccgaaggcagcgctccaggtacctctactgaaccttccgagggcagcgctccaggtacctctaccgaaccttctgaaggtagcgcaccaggtacttctaccgaaccgtccgagggtagcgcaccaggtagcccagcaggttctcctacctccaccgaggaaggtacttctaccgaaccgtccgagggtagcgcaccaggtacctctgaaagcgcaactcctgagtctggcccaggtagcgaacctgctacctccggctctgagactccaggtacctctgaaagcgcaaccccggaatctggtccaggtagcgaacctgcaacctctggctctgaaaccccaggtacctctgaaagcgctactcctgaatctggcccaggtacttctactgaaccgtccgagggcagcgcaccaggtacttctgaaagcgctactcctgagtccggcccaggtagcccggctggctctccgacttccaccgaggaaggtagcccggctggctctccaacttctactgaagaaggtagcccggcaggctctccgacctctactgaggaaggtacttctgaaagcgcaaccccggagtccggcccaggtacctctaccgaaccgtctgagggcagcgcacca

SEQ ID NO: 200 - DNA, 2625 bp, Artificial Sequence
  Description of Artificial Sequence: Synthetic polynucleotide
ggtacttctactgaaccgtctgaaggcagcgcaccaggtagcgaaccggctacttccggttctgaaaccccaggtagcccagcaggttctccaacttctactgaagaaggttctaccagctctaccgcagaatctcctggtccaggtacctctactccggaaagcggctctgcatctccaggttctactagcgaatctccttctggcactgcaccaggttctactagcgaatccccgtctggtactgctccaggtacttctactcctgaaagcggttccgcttctccaggtacctctactccggaaagcggttctgcatctccaggtagcgaaccggcaacctccggctctgaaaccccaggtacctctgaaagcgctactcctgaatccggcccaggtagcccggcaggttctccgacttccactgaggaaggtacctctactgaaccttctgagggcagcgctccaggtacttctgaaagcgctaccccggagtccggtccaggtacttctactgaaccgtccgaaggtagcgcaccaggtacttctaccgaaccgtccgagggtagcgcaccaggtagcccagcaggttctcctacctccaccgaggaaggtacttctaccgaaccgtccgagggtagcgcaccaggtacttctaccgaaccttccgagggcagcgcaccaggtacttctgaaagcgctacccctgagtccggcccaggtacttctgaaagcgctactcctgaatccggtccaggtacctctactgaaccttccgaaggcagcgctccaggtacctctaccgaaccgtccgagggcagcgcaccaggtacttctgaaagcgcaacccctgaatccggtccaggtacttctactgaaccttccgaaggtagcgctccaggtagcgaacctgctacttctggttctgaaaccccaggtagcccggctggctctccgacctccaccgaggaaggtagctctaccccgtctggtgctactggttctccaggtactccgggcagcggtactgcttcttcctctccaggtagctctaccccttctggtgctactggctctccaggtacctctaccgaaccgtccgagggtagcgcaccaggtacctctactgaaccgtctgagggtagcgctccaggtagcgaaccggcaacctccggttctgaaactccaggtagccctgctggctctccgacttctactgaggaaggtagcccggctggttctccgacttctactgaggaaggtacttctaccgaaccttccgaaggtagcgctccaggtgcaagcgcaagcggcgcgccaagcacgggaggtacttctgaaagcgctactcctgagtccggcccaggtagcccggctggctctccgacttccaccgaggaaggtagcccggctggctctccaacttctactgaagaaggttctaccagctctaccgctgaatctcctggcccaggttctactagcgaatctccgtctggcaccgcaccaggtacttcccctagcggtgaatcttctactgcaccaggtacccctggcagcggtaccgcttcttcctctccaggtagctctaccccgtctggtgctactggctctccaggttctagcccgtctgcatctaccggtaccggcccaggtagcgaaccggcaacctccggctctgaaactccaggtacttctgaaagcgctactccggaatccggcccaggtagcgaaccggctacttccggctctgaaaccccaggttccaccagctctactgcagaatctccgggcccaggttctactagctctactgcagaatctccgggtccaggtacttctcctagcggcgaatcttctaccgctccaggtagcgaaccggcaacctctggctctgaaactccaggtagcgaacctgcaacctccggctctgaaaccccaggtacttctactgaaccttctgagggcagcgcaccaggttctaccagctctaccgcagaatctcctggtccaggtacctctactccggaaagcggctctgcatctccaggttctactagcgaatctccttctggcactgcaccaggtacttctaccgaaccgtccgaaggcagcgctccaggtacctctactgaaccttccgagggcagcgctccaggtacctctaccgaaccttctgaaggtagcgcaccaggtagctctactccgtctggtgcaaccggctccccaggttctagcccgtctgcttccactggtactggcccaggtgcttccccgggcaccagctctactggttctccaggtagcgaacctgctacctccggttctgaaaccccaggtacctctgaaagcgcaactccggagtctggtccaggtagccctgcaggttctcctacctccactgaggaaggtagctctactccgtctggtgcaaccggctccccaggttctagcccgtctgcttccactggtactggcccaggtgcttccccgggcaccagctctactggttctccaggtacctctgaaagcgctactccggagtctggcccaggtacctctactgaaccgtctgagggtagcgctccaggtacttctactgaaccgtccgaaggtagcgcacca

SEQ ID NO: 201 - DNA, 2592 bp, Artificial Sequence
  Description of Artificial Sequence: Synthetic polynucleotide
ggtagcccggctggctctcctacctctactgaggaaggtacttctgaaagcgctactcctgagtctggtccaggtacctctactgaaccgtccgaaggtagcgctccaggtagcccagcaggctctccgacttccactgaggaaggtacttctactgaaccttccgaaggcagcgcaccaggtacctctactgaaccttctgagggcagcgctccaggtacttctgaaagcgctaccccggaatctggcccaggtagcgaaccggctacttctggttctgaaaccccaggtagcgaaccggctacctccggttctgaaactccaggtagcccggcaggctctccgacctctactgaggaaggtacttctgaaagcgcaaccccggagtccggcccaggtacctctaccgaaccgtctgagggcagcgcaccaggtacttctaccgaaccgtccgagggtagcgcaccaggtagcccagcaggttctcctacctccaccgaggaaggtacttctaccgaaccgtccgagggtagcgcaccaggtacctctactgaaccttctgagggcagcgctccaggtacttctgaaagcgctaccccggagtccggtccaggtacttctactgaaccgtccgaaggtagcgcaccaggtacttctgaaagcgcaacccctgaatccggtccaggtagcgaaccggctacttctggctctgagactccaggtacttctaccgaaccgtccgaaggtagcgcaccaggtacttctactgaaccgtctgaaggtagcgcaccaggtacttctgaaagcgcaaccccggaatccggcccaggtacctctgaaagcgcaaccccggagtccggcccaggtagccctgctggctctccaacctccaccgaagaaggtacctctgaaagcgcaacccctgaatccggcccaggtagcgaaccggcaacctccggttctgaaaccccaggtacctctgaaagcgctactccggagtctggcccaggtacctctactgaaccgtctgagggtagcgctccaggtacttctactgaaccgtccgaaggtagcgcaccaggtacttctaccgaaccgtccgaaggcagcgctccaggtacctctactgaaccttccgagggcagcgctccaggtacctctaccgaaccttctgaaggtagcgcaccaggtacttctaccgaaccgtccgagggtagcgcaccaggtagcccagcaggttctcctacctccaccgaggaaggtacttctaccgaaccgtccgagggtagcgcaccaggtacctctgaaagcgcaactcctgagtctggcccaggtagcgaacctgctacctccggctctgagactccaggtacctctgaaagcgcaaccccggaatctggtccaggtagcgaacctgcaacctctggctctgaaaccccaggtacctctgaaagcgctactcctgaatctggcccaggtacttctactgaaccgtccgagggcagcgcaccaggtacttctgaaagcgctactcctgagtccggcccaggtagcccggctggctctccgacttccaccgaggaaggtagcccggctggctctccaacttctactgaagaaggtagcccggcaggctctccgacctctactgaggaaggtacttctgaaagcgcaaccccggagtccggcccaggtacctctaccgaaccgtctgagggcagcgcaccaggtacctctgaaagcgcaactcctgagtctggcccaggtagcgaacctgctacctccggctctgagactccaggtacctctgaaagcgcaaccccggaatctggtccaggtagcgaacctgcaacctctggctctgaaaccccaggtacctctgaaagcgctactcctgaatctggcccaggtacttctactgaaccgtccgagggcagcgcaccaggtagccctgctggctctccaacctccaccgaagaaggtacctctgaaagcgcaacccctgaatccggcccaggtagcgaaccggcaacctccggttctgaaaccccaggtacttctgaaagcgctactcctgagtccggcccaggtagcccggctggctctccgacttccaccgaggaaggtagcccggctggctctccaacttctactgaagaaggtacttctaccgaaccttccgagggcagcgcaccaggtacttctgaaagcgctacccctgagtccggcccaggtacttctgaaagcgctactcctgaatccggtccaggtacttctgaaagcgctaccccggaatctggcccaggtagcgaaccggctacttctggttctgaaaccccaggtagcgaaccggctacctccggttctgaaactccaggtagcccagcaggctctccgacttccactgaggaaggtacttctactgaaccttccgaaggcagcgcaccaggtacctctactgaaccttctgagggcagcgctccaggtagcgaacctgcaacctctggctctgaaaccccaggtacctctgaaagcgctactcctgaatctggcccaggtacttctactgaaccgtccgagggcagcgcacca

SEQ ID NO: 202 - DNA, 2625 bp, Artificial Sequence
  Description of Artificial Sequence: Synthetic polynucleotide
  modified_base (1287)..(1298): a, c, t, g, unknown or other
  modified_base (1330)..(1337): a, c, t, g, unknown or other
ggttctaccagcgaatctccttctggcaccgctccaggtacctctcctagcggcgaatcttctaccgctccaggttctactagcgaatctccttctggcactgcaccaggttctactagcgaatccccgtctggtactgctccaggtacttctactcctgaaagcggttccgcttctccaggtacctctactccggaaagcggttctgcatctccaggttctaccagcgaatctccttctggcaccgctccaggttctactagcgaatccccgtctggtaccgcaccaggtacttctcctagcggcgaatcttctaccgcaccaggttctactagcgaatctccgtctggcactgctccaggtacttctcctagcggtgaatcttctaccgctccaggtacttcccctagcggcgaatcttctaccgctccaggttctactagctctactgcagaatctccgggcccaggtacctctcctagcggtgaatcttctaccgctccaggtacttctccgagcggtgaatcttctaccgctccaggttctactagctctactgcagaatctcctggcccaggtacctctactccggaaagcggctctgcatctccaggtacttctacccctgaaagcggttctgcatctccaggttctactagcgaatctccttctggcactgcaccaggttctaccagcgaatctccgtctggcactgcaccaggtacctctacccctgaaagcggttccgcttctccaggttctaccagctctaccgcagaatctcctggtccaggtacctctactccggaaagcggctctgcatctccaggttctactagcgaatctccttctggcactgcaccaggtacttctccgagcggtgaatcttctaccgcaccaggttctactagctctaccgctgaatctccgggcccaggtacttctccgagcggtgaatcttctactgctccaggtacctctactcctgaaagcggttctgcatctccaggttccactagctctaccgcagaatctccgggcccaggttctactagctctactgctgaatctcctggcccaggttctactagctctactgctgaatctccgggtccaggttctaccagctctactgctgaatctcctggtccaggtacctccccgagcggtgaatcttctactgcaccaggttctactagcgaatctccttctggcactgcaccaggttctaccagcgaatctccgtctggcactgcaccaggtacctctacccctgaaagcggtccnnnnnnnnnnnntgcaagcgcaagcggcgcgccaagcacgggannnnnnnntagcgaatctccttctggtaccgctccaggttctaccagcgaatccccgtctggtactgctccaggttctaccagcgaatctccttctggtactgcaccaggttctactagcgaatctccttctggtaccgctccaggttctaccagcgaatccccgtctggtactgctccaggttctaccagcgaatctccttctggtactgcaccaggtacttctactccggaaagcggttccgcatctccaggtacttctcctagcggtgaatcttctactgctccaggtacctctcctagcggcgaatcttctactgctccaggttctaccagctctactgctgaatctccgggtccaggtacttccccgagcggtgaatcttctactgcaccaggtacttctactccggaaagcggttccgcttctccaggttctaccagcgaatctccttctggcaccgctccaggttctactagcgaatccccgtctggtaccgcaccaggtacttctcctagcggcgaatcttctaccgcaccaggttctactagcgaatccccgtctggtaccgcaccaggtacttctaccccggaaagcggctctgcttctccaggtacttctaccccggaaagcggctccgcatctccaggttctactagcgaatctccttctggtaccgctccaggtacttctacccctgaaagcggctccgcttctccaggttccactagctctaccgctgaatctccgggtccaggttctaccagcgaatctccttctggcaccgctccaggttctactagcgaatccccgtctggtaccgcaccaggtacttctcctagcggcgaatcttctaccgcaccaggttctaccagctctactgctgaatctccgggtccaggtacttccccgagcggtgaatcttctactgcaccaggtacttctactccggaaagcggttccgcttctccaggtacctcccctagcggcgaatcttctactgctccaggtacctctcctagcggcgaatcttctaccgctccaggtacctcccctagcggtgaatcttctaccgcaccaggttctactagctctactgctgaatctccgggtccaggttctaccagctctactgctgaatctcctggtccaggtacctccccgagcggtgaatcttctactgcaccaggttctagcccttctgcttccaccggtaccggcccaggtagctctactccgtctggtgcaactggctctccaggtagctctactccgtctggtgcaaccggctcccca

SEQ ID NO: 203 - DNA, 2592 bp, Artificial Sequence
  Description of Artificial Sequence: Synthetic polynucleotide
ggtgcttccccgggcaccagctctactggttctccaggttctagcccgtctgcttctactggtactggtccaggttctagcccttctgcttccactggtactggtccaggtaccccgggtagcggtaccgcttcttcttctccaggtagctctactccgtctggtgctaccggctctccaggttctaacccttctgcatccaccggtaccggcccaggtgcttctccgggcaccagctctactggttctccaggtaccccgggcagcggtaccgcatcttcttctccaggtagctctactccttctggtgcaactggttctccaggtactcctggcagcggtaccgcttcttcttctccaggtgcttctcctggtactagctctactggttctccaggtgcttctccgggcactagctctactggttctccaggtaccccgggtagcggtactgcttcttcctctccaggtagctctaccccttctggtgcaaccggctctccaggtgcttctccgggcaccagctctaccggttctccaggtaccccgggtagcggtaccgcttcttcttctccaggtagctctactccgtctggtgctaccggctctccaggttctaacccttctgcatccaccggtaccggcccaggttctagcccttctgcttccaccggtactggcccaggtagctctaccccttctggtgctaccggctccccaggtagctctactccttctggtgcaactggctctccaggtgcatctccgggcactagctctactggttctccaggtgcatcccctggcactagctctactggttctccaggtgcttctcctggtaccagctctactggttctccaggtactcctggcagcggtaccgcttcttcttctccaggtgcttctcctggtactagctctactggttctccaggtgcttctccgggcactagctctactggttctccaggtgcttccccgggcactagctctaccggttctccaggttctagcccttctgcatctactggtactggcccaggtactccgggcagcggtactgcttcttcctctccaggtgcatctccgggcactagctctactggttctccaggtgcatcccctggcactagctctactggttctccaggtgcttctcctggtaccagctctactggttctccaggtagctctactccgtctggtgcaaccggttccccaggtagctctactccttctggtgctactggctccccaggtgcatcccctggcaccagctctaccggttctccaggtaccccgggcagcggtaccgcatcttcctctccaggtagctctaccccgtctggtgctaccggttccccaggtagctctaccccgtctggtgcaaccggctccccaggtagctctactccgtctggtgcaaccggctccccaggttctagcccgtctgcttccactggtactggcccaggtgcttccccgggcaccagctctactggttctccaggtgcatccccgggtaccagctctaccggttctccaggtactcctggcagcggtactgcatcttcctctccaggtgcttctccgggcaccagctctactggttctccaggtgcatctccgggcactagctctactggttctccaggtgcatcccctggcactagctctactggttctccaggtgcttctcctggtaccagctctactggttctccaggtacccctggtagcggtactgcttcttcctctccaggtagctctactccgtctggtgctaccggttctccaggtaccccgggtagcggtaccgcatcttcttctccaggtagctctaccccgtctggtgctactggttctccaggtactccgggcagcggtactgcttcttcctctccaggtagctctaccccttctggtgctactggctctccaggtagctctaccccgtctggtgctactggctccccaggttctagcccttctgcatccaccggtaccggtccaggttctagcccgtctgcatctactggtactggtccaggtgcatccccgggcactagctctaccggttctccaggtactcctggtagcggtactgcttcttcttctccaggtagctctactccttctggtgctactggttctccaggttctagcccttctgcatccaccggtaccggcccaggttctagcccgtctgcttctaccggtactggtccaggtgcttctccgggtactagctctactggttctccaggtgcatctcctggtactagctctactggttctccaggtagctctactccgtctggtgcaaccggctctccaggttctagcccttctgcatctaccggtactggtccaggtgcatcccctggtaccagctctaccggttctccaggttctagcccttctgcttctaccggtaccggtccaggtacccctggcagcggtaccgcatcttcctctccaggtagctctactccgtctggtgcaaccggttccccaggtagctctactccttctggtgctactggctccccaggtgcatcccctggcaccagctctaccggttctcca

SEQ ID NO: 204 - DNA, 2772 bp, Artificial Sequence
  Description of Artificial Sequence: Synthetic polynucleotide
atggctgaacctgctggctctccaacctccactgaggaaggtgcatccccgggcaccagctctaccggttctccaggtagctctaccccgtctggtgctaccggctctccaggtagctctaccccgtctggtgctactggctctccaggtacttctactgaaccgtctgaaggcagcgcaccaggtagcgaaccggctacttccggttctgaaaccccaggtagcccagcaggttctccaacttctactgaagaaggttctaccagctctaccgcagaatctcctggtccaggtacctctactccggaaagcggctctgcatctccaggttctactagcgaatctccttctggcactgcaccaggttctactagcgaatccccgtctggtactgctccaggtacttctactcctgaaagcggttccgcttctccaggtacctctactccggaaagcggttctgcatctccaggtagcgaaccggcaacctccggctctgaaaccccaggtacctctgaaagcgctactcctgaatccggcccaggtagcccggcaggttctccgacttccactgaggaaggtacctctactgaaccttctgagggcagcgctccaggtacttctgaaagcgctaccccggagtccggtccaggtacttctactgaaccgtccgaaggtagcgcaccaggtacttctaccgaaccgtccgagggtagcgcaccaggtagcccagcaggttctcctacctccaccgaggaaggtacttctaccgaaccgtccgagggtagcgcaccaggtacttctaccgaaccttccgagggcagcgcaccaggtacttctgaaagcgctacccctgagtccggcccaggtacttctgaaagcgctactcctgaatccggtccaggtacctctactgaaccttccgaaggcagcgctccaggtacctctaccgaaccgtccgagggcagcgcaccaggtacttctgaaagcgcaacccctgaatccggtccaggtacttctactgaaccttccgaaggtagcgctccaggtagcgaacctgctacttctggttctgaaaccccaggtagcccggctggctctccgacctccaccgaggaaggtagctctaccccgtctggtgctactggttctccaggtactccgggcagcggtactgcttcttcctctccaggtagctctaccccttctggtgctactggctctccaggtacctctaccgaaccgtccgagggtagcgcaccaggtacctctactgaaccgtctgagggtagcgctccaggtagcgaaccggcaacctccggttctgaaactccaggtagccctgctggctctccgacttctactgaggaaggtagcccggctggttctccgacttctactgaggaaggtacttctaccgaaccttccgaaggtagcgctccaggtgcaagcgcaagcggcgcgccaagcacgggaggtacttctgaaagcgctactcctgagtccggcccaggtagcccggctggctctccgacttccaccgaggaaggtagcccggctggctctccaacttctactgaagaaggttctaccagctctaccgctgaatctcctggcccaggttctactagcgaatctccgtctggcaccgcaccaggtacttcccctagcggtgaatcttctactgcaccaggtacccctggcagcggtaccgcttcttcctctccaggtagctctaccccgtctggtgctactggctctccaggttctagcccgtctgcatctaccggtaccggcccaggtagcgaaccggcaacctccggctctgaaactccaggtacttctgaaagcgctactccggaatccggcccaggtagcgaaccggctacttccggctctgaaaccccaggttccaccagctctactgcagaatctccgggcccaggttctactagctctactgcagaatctccgggtccaggtacttctcctagcggcgaatcttctaccgctccaggtagcgaaccggcaacctctggctctgaaactccaggtagcgaacctgcaacctccggctctgaaaccccaggtacttctactgaaccttctgagggcagcgcaccaggttctaccagctctaccgcagaatctcctggtccaggtacctctactccggaaagcggctctgcatctccaggttctactagcgaatctccttctggcactgcaccaggtacttctaccgaaccgtccgaaggcagcgctccaggtacctctactgaaccttccgagggcagcgctccaggtacctctaccgaaccttctgaaggtagcgcaccaggtagctctactccgtctggtgcaaccggctccccaggttctagcccgtctgcttccactggtactggcccaggtgcttccccgggcaccagctctactggttctccaggtagcgaacctgctacctccggttctgaaaccccaggtacctctgaaagcgcaactccggagtctggtccaggtagccctgcaggttctcctacctccactgaggaaggtagctctactccgtctggtgcaaccggctccccaggttctagcccgtctgcttccactggtactggcccaggtgcttccccgggcaccagctctactggttctccaggtacctctgaaagcgctactccggagtctggcccaggtacctctactgaaccgtctgagggtagcgctccaggtacttctactgaaccgtccgaaggtagcgcacca

SEQ ID NO: 205 - DNA, 2739 bp, Artificial Sequence
  Description of Artificial Sequence: Synthetic polynucleotide
atggctgaacctgctggctctccaacctccactgaggaaggtaccccgggtagcggtactgcttcttcctctccaggtagctctaccccttctggtgcaaccggctctccaggtgcttctccgggcaccagctctaccggttctccaggtagcccggctggctctcctacctctactgaggaaggtacttctgaaagcgctactcctgagtctggtccaggtacctctactgaaccgtccgaaggtagcgctccaggtagcccagcaggctctccgacttccactgaggaaggtacttctactgaaccttccgaaggcagcgcaccaggtacctctactgaaccttctgagggcagcgctccaggtacttctgaaagcgctaccccggaatctggcccaggtagcgaaccggctacttctggttctgaaaccccaggtagcgaaccggctacctccggttctgaaactccaggtagcccggcaggctctccgacctctactgaggaaggtacttctgaaagcgcaaccccggagtccggcccaggtacctctaccgaaccgtctgagggcagcgcaccaggtacttctaccgaaccgtccgagggtagcgcaccaggtagcccagcaggttctcctacctccaccgaggaaggtacttctaccgaaccgtccgagggtagcgcaccaggtacctctactgaaccttctgagggcagcgctccaggtacttctgaaagcgctaccccggagtccggtccaggtacttctactgaaccgtccgaaggtagcgcaccaggtacttctgaaagcgcaacccctgaatccggtccaggtagcgaaccggctacttctggctctgagactccaggtacttctaccgaaccgtccgaaggtagcgcaccaggtacttctactgaaccgtctgaaggtagcgcaccaggtacttctgaaagcgcaaccccggaatccggcccaggtacctctgaaagcgcaaccccggagtccggcccaggtagccctgctggctctccaacctccaccgaagaaggtacctctgaaagcgcaacccctgaatccggcccaggtagcgaaccggcaacctccggttctgaaaccccaggtacctctgaaagcgctactccggagtctggcccaggtacctctactgaaccgtctgagggtagcgctccaggtacttctactgaaccgtccgaaggtagcgcaccaggtacttctaccgaaccgtccgaaggcagcgctccaggtacctctactgaaccttccgagggcagcgctccaggtacctctaccgaaccttctgaaggtagcgcaccaggtacttctaccgaaccgtccgagggtagcgcaccaggtagcccagcaggttctcctacctccaccgaggaaggtacttctaccgaaccgtccgagggtagcgcaccaggtacctctgaaagcgcaactcctgagtctggcccaggtagcgaacctgctacctccggctctgagactccaggtacctctgaaagcgcaaccccggaatctggtccaggtagcgaacctgcaacctctggctctgaaaccccaggtacctctgaaagcgctactcctgaatctggcccaggtacttctactgaaccgtccgagggcagcgcaccaggtacttctgaaagcgctactcctgagtccggcccaggtagcccggctggctctccgacttccaccgaggaaggtagcccggctggctctccaacttctactgaagaaggtagcccggcaggctctccgacctctactgaggaaggtacttctgaaagcgcaaccccggagtccggcccaggtacctctaccgaaccgtctgagggcagcgcaccaggtacctctgaaagcgcaactcctgagtctggcccaggtagcgaacctgctacctccggctctgagactccaggtacctctgaaagcgcaaccccggaatctggtccaggtagcgaacctgcaacctctggctctgaaaccccaggtacctctgaaagcgctactcctgaatctggcccaggtacttctactgaaccgtccgagggcagcgcaccaggtagccctgctggctctccaacctccaccgaagaaggtacctctgaaagcgcaacccctgaatccggcccaggtagcgaaccggcaacctccggttctgaaaccccaggtacttctgaaagcgctactcctgagtccggcccaggtagcccggctggctctccgacttccaccgaggaaggtagcccggctggctctccaacttctactgaagaaggtacttctaccgaaccttccgagggcagcgcaccaggtacttctgaaagcgctacccctgagtccggcccaggtacttctgaaagcgctactcctgaatccggtccaggtacttctgaaagcgctaccccggaatctggcccaggtagcgaaccggctacttctggttctgaaaccccaggtagcgaaccggctacctccggttctgaaactccaggtagcccagcaggctctccgacttccactgaggaaggtacttctactgaaccttccgaaggcagcgcaccaggtacctctactgaaccttctgagggcagcgctccaggtagcgaacctgcaacctctggctctgaaaccccaggtacctctgaaagcgctactcctgaatctggcccaggtacttctactgaaccgtccgagggcagcgcacca

SEQ ID NO: 206 - DNA, 3954 bp, Artificial Sequence
  Description of Artificial Sequence: Synthetic polynucleotide
ggtacttctactgaaccgtctgaaggcagcgcaccaggtagcgaaccggctacttccggttctgaaaccccaggtagcccagcaggttctccaacttctactgaagaaggttctaccagctctaccgcagaatctcctggtccaggtacctctactccggaaagcggctctgcatctccaggttctactagcgaatctccttctggcactgcaccaggttctactagcgaatccccgtctggtactgctccaggtacttctactcctgaaagcggttccgcttctccaggtacctctactccggaaagcggttctgcatctccaggtagcgaaccggcaacctccggctctgaaaccccaggtacctctgaaagcgctactcctgaatccggcccaggtagcccggcaggttctccgacttccactgaggaaggtacctctactgaaccttctgagggcagcgctccaggtacttctgaaagcgctaccccggagtccggtccaggtacttctactgaaccgtccgaaggtagcgcaccaggtacttctaccgaaccgtccgagggtagcgcaccaggtagcccagcaggttctcctacctccaccgaggaaggtacttctaccgaaccgtccgagggtagcgcaccaggtacttctaccgaaccttccgagggcagcgcaccaggtacttctgaaagcgctacccctgagtccggcccaggtacttctgaaagcgctactcctgaatccggtccaggtacctctactgaaccttccgaaggcagcgctccaggtacctctaccgaaccgtccgagggcagcgcaccaggtacttctgaaagcgcaacccctgaatccggtccaggtacttctactgaaccttccgaaggtagcgctccaggtagcgaacctgctacttctggttctgaaaccccaggtagcccggctggctctccgacctccaccgaggaaggtagctctaccccgtctggtgctactggttctccaggtactccgggcagcggtactgcttcttcctctccaggtagctctaccccttctggtgctactggctctccaggtacctctaccgaaccgtccgagggtagcgcaccaggtacctctactgaaccgtctgagggtagcgctccaggtagcgaaccggcaacctccggttctgaaactccaggtagccctgctggctctccgacttctactgaggaaggtagcccggctggttctccgacttctactgaggaaggtacttctaccgaaccttccgaaggtagcgctccaggtccagaaccaacggggccggccccaagcggaggtagcgaaccggcaacctccggctctgaaaccccaggtacctctgaaagcgctactcctgaatccggcccaggtagcccggcaggttctccgacttccactgaggaaggtacttctgaaagcgctactcctgagtccggcccaggtagcccggctggctctccgacttccaccgaggaaggtagcccggctggctctccaacttctactgaagaaggtacttctgaaagcgctactcctgagtccggcccaggtagcccggctggctctccgacttccaccgaggaaggtagcccggctggctctccaacttctactgaagaaggttctaccagctctaccgctgaatctcctggcccaggttctactagcgaatctccgtctggcaccgcaccaggtacttcccctagcggtgaatcttctactgcaccaggttctaccagcgaatctccttctggcaccgctccaggttctactagcgaatccccgtctggtaccgcaccaggtacttctcctagcggcgaatcttctaccgcaccaggtacttctaccgaaccttccgagggcagcgcaccaggtacttctgaaagcgctacccctgagtccggcccaggtacttctgaaagcgctactcctgaatccggtccaggtagcgaaccggcaacctctggctctgaaaccccaggtacctctgaaagcgctactccggaatctggtccaggtacttctgaaagcgctactccggaatccggtccaggtacctctactgaaccttctgagggcagcgctccaggtacttctgaaagcgctaccccggagtccggtccaggtacttctactgaaccgtccgaaggtagcgcaccaggtacctcccctagcggcgaatcttctactgctccaggtacctctcctagcggcgaatcttctaccgctccaggtacctcccctagcggtgaatcttctaccgcaccaggtacttctaccgaaccgtccgagggtagcgcaccaggtagcccagcaggttctcctacctccaccgaggaaggtacttctaccgaaccgtccgagggtagcgcaccaggttctagcccttctgcttccaccggtaccggcccaggtagctctactccgtctggtgcaactggctctccaggtagctctactccgtctggtgcaaccggctccccaggtagctctaccccgtctggtgctaccggctctccaggtagctctaccccgtctggtgcaaccggctccccaggtgcatccccgggtactagctctaccggttctccaggtgcaagcgcaagcggcgcgccaagcacgggaggtacttctccgagcggtgaatcttctaccgcaccaggttctactagctctaccgctgaatctccgggcccaggtacttctccgagcggtgaatcttctactgctccaggtacctctgaaagcgctactccggagtctggcccaggtacctctactgaaccgtctgagggtagcgctccaggtacttctactgaaccgtccgaaggtagcgcaccaggttctagcccttctgcatctactggtactggcccaggtagctctactccttctggtgctaccggctctccaggtgcttctccgggtactagctctaccggttctccaggtacttctactccggaaagcggttccgcatctccaggtacttctcctagcggtgaatcttctactgctccaggtacctctcctagcggcgaatcttctactgctccaggtacttctgaaagcgcaacccctgaatccggtccaggtagcgaaccggctacttctggctctgagactccaggtacttctaccgaaccgtccgaaggtagcgcaccaggttctaccagcgaatccccttctggtactgctccaggttctaccagcgaatccccttctggcaccgcaccaggtacttctacccctgaaagcggctccgcttctccaggtagcccggcaggctctccgacctctactgaggaaggtacttctgaaagcgcaaccccggagtccggcccaggtacctctaccgaaccgtctgagggcagcgcaccaggtagccctgctggctctccaacctccaccgaagaaggtacctctgaaagcgcaacccctgaatccggcccaggtagcgaaccggcaacctccggttctgaaaccccaggtagctctaccccgtctggtgctaccggttccccaggtgcttctcctggtactagctctaccggttctccaggtagctctaccccgtctggtgctactggctctccaggttctactagcgaatccccgtctggtactgctccaggtacttcccctagcggtgaatcttctactgctccaggttctaccagctctaccgcagaatctccgggtccaggtagctctaccccttctggtgcaaccggctctccaggtgcatccccgggtaccagctctaccggttctccaggtactccgggtagcggtaccgcttcttcctctccaggtagccctgctggctctccgacttctactgaggaaggtagcccggctggttctccgacttctactgaggaaggtacttctaccgaaccttccgaaggtagcgctcca

SEQ ID NO: 207 - DNA, 2592 bp, Artificial Sequence
  Description of Artificial Sequence: Synthetic polynucleotide
ggtacttccaccgaaccatccgaaccaggtagcgcaggtacttccaccgaaccatccgaacctggcagcgcaggtagcgaaccggcaacctctggtactgaaccatcaggtagcggcgcatccgagcctacctctactgaaccaggtagcgaaccggctacctccggtactgagccatcaggtagcgaaccggcaacttccggtactgaaccatcaggtagcgaaccggcaacttccggcactgaaccatcaggtagcggtgcatctgagccgacctctactgaaccaggtacttctactgaaccatctgagccgggcagcgcaggtagcgaaccagctacttctggcactgaaccatcaggtacttctactgaaccatccgaaccaggtagcgcaggtagcgaacctgctacctctggtactgagccatcaggtagcgaaccggctacctctggtactgaaccatcaggtacttctaccgaaccatccgagcctggtagcgcaggtacttctaccgaaccatccgagccaggcagcgcaggtagcgaaccggcaacctctggcactgagccatcaggtagcgaaccagcaacttctggtactgaaccatcaggtactagcgagccatctacttccgaaccaggtgcaggtagcggcgcatccgaacctacttccactgaaccaggtactagcgagccatccacctctgaaccaggtgcaggtagcgaaccggcaacttccggcactgaaccatcaggtagcgaaccggctacctctggtactgaaccatcaggtacttctaccgaaccatccgagcctggtagcgcaggtacttctaccgaaccatccgagccaggcagcgcaggtagcggtgcatccgagccgacctctactgaaccaggtagcgaaccagcaacttctggcactgagccatcaggtagcgaaccagctacctctggtactgaaccatcaggtagcgaaccggctacttccggcactgaaccatcaggtagcgaaccagcaacctccggtactgaaccatcaggtacttccactgaaccatccgaaccgggtagcgcaggtagcgaaccggcaacttccggcactgaaccatcaggtagcggtgcatctgagccgacctctactgaaccaggtacttctactgaaccatctgagccgggcagcgcaggtagcgaacctgcaacctccggcactgagccatcaggtagcggcgcatctgaaccaacctctactgaaccaggtacttccaccgaaccatctgagccaggcagcgcaggtagcggcgcatctgaaccaacctctactgaaccaggtagcgaaccagcaacttctggtactgaaccatcaggtagcggcgcatctgagcctacttccactgaaccaggtagcgaaccggcaacttccggcactgaaccatcaggtagcggtgcatctgagccgacctctactgaaccaggtacttctactgaaccatctgagccgggcagcgcaggtagcgaaccggcaacttccggcactgaaccatcaggtagcggtgcatctgagccgacctctactgaaccaggtacttctactgaaccatctgagccgggcagcgcaggtagcgaaccagctacttctggcactgaaccatcaggtacttctactgaaccatccgaaccaggtagcgcaggtagcgaacctgctacctctggtactgagccatcaggtacttctactgaaccatccgagccgggtagcgcaggtacttccactgaaccatctgaacctggtagcgcaggtacttccactgaaccatccgaaccaggtagcgcaggtacttctactgaaccatccgagccgggtagcgcaggtacttccactgaaccatctgaacctggtagcgcaggtacttccactgaaccatccgaaccaggtagcgcaggtactagcgaaccatccacctccgaaccaggcgcaggtagcggtgcatctgaaccgacttctactgaaccaggtacttccactgaaccatctgagccaggtagcgcaggtacttccaccgaaccatccgaaccaggtagcgcaggtacttccaccgaaccatccgaacctggcagcgcaggtagcgaaccggcaacctctggtactgaaccatcaggtagcggtgcatccgagccgacctctactgaaccaggtagcgaaccagcaacttctggcactgagccatcaggtagcgaaccagctacctctggtactgaaccatcaggtagcgaaccggcaacctctggcactgagccatcaggtagcgaaccagcaacttctggtactgaaccatcaggtactagcgagccatctacttccgaaccaggtgcaggtagcgaacctgcaacctccggcactgagccatcaggtagcggcgcatctgaaccaacctctactgaaccaggtacttccaccgaaccatctgagccaggcagcgcaggtagcgaacctgcaacctccggcactgagccatcaggtagcggcgcatctgaaccaacctctactgaaccaggtacttccaccgaaccatctgagccaggcagcgca

SEQ ID NO: 208 - DNA, 2592 bp, Artificial Sequence
  Description of Artificial Sequence: Synthetic polynucleotide
ggtagcgaaactgctacttccggctctgagactgcaggtactagtgaatccgcaactagcgaatctggcgcaggtagcactgcaggctctgagacttccactgaagcaggtactagcgagtccgcaaccagcgaatccggcgcaggtagcgaaactgctacctctggctccgagactgcaggtagcgaaactgcaacctctggctctgaaactgcaggtacttccactgaagcaagtgaaggctccgcatcaggtacttccaccgaagcaagcgaaggctccgcatcaggtactagtgagtccgcaactagcgaatccggtgcaggtagcgaaaccgctacctctggttccgaaactgcaggtacttctaccgaggctagcgaaggttctgcatcaggtagcactgctggttccgagacttctactgaagcaggtactagcgaatctgctactagcgaatccggcgcaggtactagcgaatccgctaccagcgaatccggcgcaggtagcgaaactgcaacctctggttccgagactgcaggtactagcgagtccgctactagcgaatctggcgcaggtacttccactgaagctagtgaaggttctgcatcaggtagcgaaactgctacttctggttccgaaactgcaggtagcgaaaccgctacctctggttccgaaactgcaggtacttctaccgaggctagcgaaggttctgcatcaggtagcactgctggttccgagacttctactgaagcaggtactagcgagtccgctactagcgaatctggcgcaggtacttccactgaagctagtgaaggttctgcatcaggtagcgaaactgctacttctggttccgaaactgcaggtagcactgctggctccgagacttctaccgaagcaggtagcactgcaggttccgaaacttccactgaagcaggtagcgaaactgctacctctggctctgagactgcaggtactagcgaatctgctactagcgaatccggcgcaggtactagcgaatccgctaccagcgaatccggcgcaggtagcgaaactgcaacctctggttccgagactgcaggtactagcgaatctgctactagcgaatccggcgcaggtactagcgaatccgctaccagcgaatccggcgcaggtagcgaaactgcaacctctggttccgagactgcaggtagcgaaaccgctacctctggttccgaaactgcaggtacttctaccgaggctagcgaaggttctgcatcaggtagcactgctggttccgagacttctactgaagcaggtagcgaaactgctacttccggctctgagactgcaggtactagtgaatccgcaactagcgaatctggcgcaggtagcactgcaggctctgagacttccactgaagcaggtagcactgctggttccgaaacctctaccgaagcaggtagcactgcaggttctgaaacctccactgaagcaggtacttccactgaggctagtgaaggctctgcatcaggtagcactgctggttccgaaacctctaccgaagcaggtagcactgcaggttctgaaacctccactgaagcaggtacttccactgaggctagtgaaggctctgcatcaggtagcactgcaggttctgagacttccaccgaagcaggtagcgaaactgctacttctggttccgaaactgcaggtacttccactgaagctagtgaaggttccgcatcaggtactagtgagtccgcaaccagcgaatccggcgcaggtagcgaaaccgcaacctccggttctgaaactgcaggtactagcgaatccgcaaccagcgaatctggcgcaggtactagtgagtccgcaaccagcgaatccggcgcaggtagcgaaaccgcaacctccggttctgaaactgcaggtactagcgaatccgcaaccagcgaatctggcgcaggtagcgaaactgctacttccggctctgagactgcaggtacttccaccgaagcaagcgaaggttccgcatcaggtacttccaccgaggctagtgaaggctctgcatcaggtagcactgctggctccgagacttctaccgaagcaggtagcactgcaggttccgaaacttccactgaagcaggtagcgaaactgctacctctggctctgagactgcaggtactagcgaatctgctactagcgaatccggcgcaggtactagcgaatccgctaccagcgaatccggcgcaggtagcgaaactgcaacctctggttccgagactgcaggtagcgaaactgctacttccggctccgagactgcaggtagcgaaactgctacttctggctccgaaactgcaggtacttctactgaggctagtgaaggttccgcatcaggtactagcgagtccgcaaccagcgaatccggcgcaggtagcgaaactgctacctctggctccgagactgcaggtagcgaaactgcaacctctggctctgaaactgcaggtactagcgaatctgctactagcgaatccggcgcaggtactagcgaatccgctaccagcgaatccggcgcaggtagcgaaactgcaacctctggttccgagactgca

SEQ ID NO: 209 - DNA, 37 bp, Artificial Sequence
  Description of Artificial Sequence: Synthetic oligonucleotide
aggtgcaagcgcaagcggcgcgccaagcacgggaggt

SEQ ID NO: 210 - DNA, 37 bp, Artificial Sequence
  Description of Artificial Sequence: Synthetic oligonucleotide
aggtccagaaccaacggggccggccccaagcggaggt

SEQ ID NO: 211 - DNA, 147 bp, Artificial Sequence
  Description of Artificial Sequence: Synthetic polynucleotide
atggctgaacctgctggctctccaacctccactgaggaaggtaccccgggtagcggtactgcttcttcctctccaggtagctctaccccttctggtgcaaccggctctccaggtgcttctccgggcaccagctctaccggttctcca

SEQ ID NO: 212 - DNA, 147 bp, Artificial Sequence
  Description of Artificial Sequence: Synthetic polynucleotide
atggctgaacctgctggctctccaacctccactgaggaaggtgcatccccgggcaccagctctaccggttctccaggtagctctaccccgtctggtgctaccggctctccaggtagctctaccccgtctggtgctactggctctcca

SEQ ID NO: 213 - protein, 12 aa, Artificial Sequence
  Description of Artificial Sequence: Synthetic peptide
GESPGGSSGSES

SEQ ID NO: 214 - protein, 12 aa, Artificial Sequence
  Description of Artificial Sequence: Synthetic peptide
GSEGSSGPGESS

SEQ ID NO: 215 - protein, 12 aa, Artificial Sequence
  Description of Artificial Sequence: Synthetic peptide
GSSESGSSEGGP

SEQ ID NO: 216 - protein, 12 aa, Artificial Sequence
  Description of Artificial Sequence: Synthetic peptide
GSGGEPSESGSS

SEQ ID NO: 217 - DNA, 36 bp, Artificial Sequence
  Description of Artificial Sequence: Synthetic oligonucleotide
aggtgaatctccdggtggytcyagcggttcygartc

SEQ ID NO: 218 - DNA, 36 bp, Artificial Sequence
  Description of Artificial Sequence: Synthetic oligonucleotide
acctgaytcrgaaccgctrgarccacchggagattc

SEQ ID NO: 219 - DNA, 36 bp, Artificial Sequence
  Description of Artificial Sequence: Synthetic oligonucleotide
aggtagcgaaggttcttcyggtccdggygartcytc

SEQ ID NO: 220 - DNA, 36 bp, Artificial Sequence
  Description of Artificial Sequence: Synthetic oligonucleotide
acctgargaytcrcchggaccrgaagaaccttcgct

SEQ ID NO: 221 - DNA, 36 bp, Artificial Sequence
  Description of Artificial Sequence: Synthetic oligonucleotide
aggttcytcygaaagcggttcttcygarggyggtcc

SEQ ID NO: 222 - DNA, 36 bp, Artificial Sequence
  Description of Artificial Sequence: Synthetic oligonucleotide
acctggaccrccytcrgaagaaccgctttcrgarga

SEQ ID NO: 223 - DNA, 36 bp, Artificial Sequence
  Description of Artificial Sequence: Synthetic oligonucleotide
aggttcyggtggygaaccdtcygartctggtagctc

SEQ ID NO: 224 - DNA, 24 bp, Artificial Sequence
  Description of Artificial Sequence: Synthetic oligonucleotide
aggttcgtcttcactcgagggtac

SEQ ID NO: 225 - DNA, 16 bp, Artificial Sequence
  Description of Artificial Sequence: Synthetic oligonucleotide
cctcgagtgaagacga

SEQ ID NO: 226 - protein, 36 aa, Artificial Sequence
  Description of Artificial Sequence: Synthetic polypeptide
GSGGEPSESGSSGESPGGSSGSESGESPGGSSGSES

SEQ ID NO: 227 - DNA, 108 bp, Artificial Sequence
  Description of Artificial Sequence: Synthetic polynucleotide
ggttctggtggcgaaccgtccgagtctggtagctcaggtgaatctccgggtggctctagcggttccgagtcaggtgaatctcctggtggttccagcggttccgagtca

SEQ ID NO: 228 - protein, 36 aa, Artificial Sequence
  Description of Artificial Sequence: Synthetic polypeptide
GSEGSSGPGESSGESPGGSSGSESGSSESGSSEGGP

SEQ ID NO: 229 - DNA, 108 bp, Artificial Sequence
  Description of Artificial Sequence: Synthetic polynucleotide
ggtagcgaaggttcttctggtcctggcgagtcttcaggtgaatctcctggtggttccagcggttctgaatcaggttcctccgaaagcggttcttccgagggcggtcca

SEQ ID NO: 230 - protein, 36 aa, Artificial Sequence
  Description of Artificial Sequence: Synthetic polypeptide
GSSESGSSEGGPGSSESGSSEGGPGESPGGSSGSES

SEQ ID NO: 231 - DNA, 108 bp, Artificial Sequence
  Description of Artificial Sequence: Synthetic polynucleotide
ggttcctctgaaagcggttcttccgaaggtggtccaggttcctctgaaagcggttcttctgagggtggtccaggtgaatctccgggtggctccagcggttccgagtca

SEQ ID NO: 232 - protein, 36 aa, Artificial Sequence
  Description of Artificial Sequence: Synthetic polypeptide
GSGGEPSESGSSGSSESGSSEGGPGSGGEPSESGSS

SEQ ID NO: 233 - DNA, 108 bp, Artificial Sequence
  Description of Artificial Sequence: Synthetic polynucleotide
ggttccggtggcgaaccgtctgaatctggtagctcaggttcttctgaaagcggttcttccgagggtggtccaggttctggtggtgaaccttccgagtctggtagctca

SEQ ID NO: 234 - protein, 36 aa, Artificial Sequence
  Description of Artificial Sequence: Synthetic polypeptide
GSSESGSSEGGPGSEGSSGPGESSGSEGSSGPGESS

SEQ ID NO: 235 - DNA, 108 bp, Artificial Sequence
  Description of Artificial Sequence: Synthetic polynucleotide
ggttcttccgaaagcggttcttctgagggtggtccaggtagcgaaggttcttccggtccaggtgagtcttcaggtagcgaaggttcttctggtcctggtgaatcttca

SEQ ID NO: 236 - protein, 36 aa, Artificial Sequence
  Description of Artificial Sequence: Synthetic polypeptide
GSSESGSSEGGPGESPGGSSGSESGSEGSSGPGESS

SEQ ID NO: 237 - DNA, 108 bp, Artificial Sequence
  Description of Artificial Sequence: Synthetic polynucleotide
ggttcctctgaaagcggttcttccgagggtggtccaggtgaatctccaggtggttccagcggttctgagtcaggtagcgaaggttcttctggtccaggtgaatcctca

SEQ ID NO: 238 - protein, 36 aa, Artificial Sequence
  Description of Artificial Sequence: Synthetic polypeptide
GSGGEPSESGSSGSGGEPSESGSSGSEGSSGPGESS

SEQ ID NO: 239 - DNA, 108 bp, Artificial Sequence
  Description of Artificial Sequence: Synthetic polynucleotide
ggttctggtggtgaaccgtctgagtctggtagctcaggttccggtggcgaaccatccgaatctggtagctcaggtagcgaaggttcttccggtccaggtgagtcttca

SEQ ID NO: 240 - protein, 36 aa, Artificial Sequence
  Description of Artificial Sequence: Synthetic polypeptide
GSSESGSSEGGPGSEGSSGPGESSGESPGGSSGSES

SEQ ID NO: 241 - DNA, 108 bp, Artificial Sequence
  Description of Artificial Sequence: Synthetic polynucleotide
ggttcttccgaaagcggttcttccgaaggcggtccaggtagcgaaggttcttctggtccaggcgaatcttcaggtgaatctcctggtggctccagcggttctgagtca

SEQ ID NO: 242 - protein, 36 aa, Artificial Sequence
  Description of Artificial Sequence: Synthetic polypeptide
GSSESGSSEGGPGSSESGSSEGGPGSSESGSSEGGP

SEQ ID NO: 243 - DNA, 108 bp, Artificial Sequence
  Description of Artificial Sequence: Synthetic polynucleotide
ggttcctccgaaagcggttcttctgagggcggtccaggttcctccgaaagcggttcttccgagggcggtccaggttcttctgaaagcggttcttccgagggcggtcca

SEQ ID NO: 244 - protein, 36 aa, Artificial Sequence
  Description of Artificial Sequence: Synthetic polypeptide
GSGGEPSESGSSGSEGSSGPGESSGSSESGSSEGGP

SEQ ID NO: 245 - DNA, 108 bp, Artificial Sequence
  Description of Artificial Sequence: Synthetic polynucleotide
ggttccggtggcgaaccgtccgaatctggtagctcaggtagcgaaggttcttctggtccaggcgaatcttcaggttcctctgaaagcggttcttctgagggcggtcca

SEQ ID NO: 246 - protein, 36 aa, Artificial Sequence; identical to SEQ ID NO: 232
  Description of Artificial Sequence: Synthetic polypeptide

SEQ ID NO: 247 - DNA, 108 bp, Artificial Sequence
  Description of Artificial Sequence: Synthetic polynucleotide
ggttctggtggtgaaccgtccgaatctggtagctcaggttcttccgaaagcggttcttctgaaggtggtccaggttccggtggcgaaccttctgaatctggtagctca

SEQ ID NO: 248 - protein, 36 aa, Artificial Sequence
  Description of Artificial Sequence: Synthetic polypeptide
GSGGEPSESGSSGSSESGSSEGGPGESPGGSSGSES

SEQ ID NO: 249 - DNA, 108 bp, Artificial Sequence
  Description of Artificial Sequence: Synthetic polynucleotide
ggttctggtggcgaaccgtccgaatctggtagctcaggttcctccgaaagcggttcttctgaaggtggtccaggtgaatctccaggtggttctagcggttctgaatca

SEQ ID NO: 250 - protein, 36 aa, Artificial Sequence
  Description of Artificial Sequence: Synthetic polypeptide
GSGGEPSESGSSGESPGGSSGSESGSEGSSGPGESS

SEQ ID NO: 251 - DNA, 108 bp, Artificial Sequence
  Description of Artificial Sequence: Synthetic polynucleotide
ggttctggtggcgaaccgtctgagtctggtagctcaggtgaatctcctggtggctccagcggttctgaatcaggtagcgaaggttcttctggtcctggtgaatcttca

SEQ ID NO: 252 - protein, 36 aa, Artificial Sequence
  Description of Artificial Sequence: Synthetic polypeptide
GSGGEPSESGSSGESPGGSSGSESGSGGEPSESGSS

SEQ ID NO: 253 - DNA, 108 bp, Artificial Sequence
  Description of Artificial Sequence: Synthetic polynucleotide
ggttccggtggcgaaccttccgaatctggtagctcaggtgaatctccgggtggttctagcggttctgagtcaggttctggtggtgaaccttccgagtctggtagctca

SEQ ID NO: 254 - protein, 36 aa, Artificial Sequence; identical to SEQ ID NO: 242
  Description of Artificial Sequence: Synthetic polypeptide

SEQ ID NO: 255 - DNA, 108 bp, Artificial Sequence
  Description of Artificial Sequence: Synthetic polynucleotide
ggttcctctgaaagcggttcttctgagggcggtccaggttcttccgaaagcggttcttccgagggcggtccaggttcttccgaaagcggttcttctgaaggcggtcca

SEQ ID NO: 256 - protein, 36 aa, Artificial Sequence
  Description of Artificial Sequence: Synthetic polypeptide
GESPGGSSGSESGSEGSSGPGESSGSEGSSGPGESS

SEQ ID NO: 257 - DNA, 108 bp, Artificial Sequence
  Description of Artificial Sequence: Synthetic polynucleotide
ggtgaatctccgggtggctccagcggttctgagtcaggtagcgaaggttcttccggtccgggtgagtcctcaggtagcgaaggttcttccggtcctggtgagtcttca

SEQ ID NO: 258 - protein, 36 aa, Artificial Sequence
  Description of Artificial Sequence: Synthetic polypeptide
GSGGEPSESGSSGSGGEPSESGSSGSSESGSSEGGP

SEQ ID NO: 259 - DNA, 108 bp, Artificial Sequence
  Description of Artificial Sequence: Synthetic polynucleotide
ggttctggtggcgaaccttccgaatctggtagctcaggttccggtggtgaaccttctgaatctggtagctcaggttcttctgaaagcggttcttccgagggcggtcca

SEQ ID NO: 260 - protein, 36 aa, Artificial Sequence
  Description of Artificial Sequence: Synthetic polypeptide
GSGGEPSESGSSGSGGEPSESGSSGSGGEPSESGSS

SEQ ID NO: 261 - DNA, 108 bp, Artificial Sequence
  Description of Artificial Sequence: Synthetic polynucleotide
ggttccggtggtgaaccttctgaatctggtagctcaggttccggtggcgaaccatccgagtctggtagctcaggttccggtggtgaaccatccgagtctggtagctca

SEQ ID NO: 262 - protein, 36 aa, Artificial Sequence
  Description of Artificial Sequence: Synthetic polypeptide
GSGGEPSESGSSGSSESGSSEGGPGSEGSSGPGESS

SEQ ID NO: 263 - DNA, 108 bp, Artificial Sequence
  Description of Artificial Sequence: Synthetic polynucleotide
ggttccggtggcgaaccttctgaatctggtagctcaggttcctccgaaagcggttcttctgagggcggtccaggtagcgaaggttcttctggtccgggcgagtcttca

SEQ ID NO: 264 - protein, 36 aa, Artificial Sequence
  Description of Artificial Sequence: Synthetic polypeptide
GSGGEPSESGSSGSEGSSGPGESSGSGGEPSESGSS

SEQ ID NO: 265 - DNA, 108 bp, Artificial Sequence
  Description of Artificial Sequence: Synthetic polynucleotide
ggttccggtggtgaaccgtccgagtctggtagctcaggtagcgaaggttcttctggtccgggtgagtcttcaggttctggtggcgaaccgtccgaatctggtagctca

SEQ ID NO: 266 - protein, 36 aa, Artificial Sequence; identical to SEQ ID NO: 252
  Description of Artificial Sequence: Synthetic polypeptide

SEQ ID NO: 267 - DNA, 108 bp, Artificial Sequence
  Description of Artificial Sequence: Synthetic polynucleotide
ggttctggtggcgaaccgtccgaatctggtagctcaggtgaatctcctggtggttccagcggttccgagtcaggttctggtggcgaaccttccgaatctggtagctca

SEQ ID NO: 268 - protein, 36 aa, Artificial Sequence
  Description of Artificial Sequence: Synthetic polypeptide
GSSESGSSEGGPGSGGEPSESGSSGSSESGSSEGGP

SEQ ID NO: 269 - DNA, 108 bp, Artificial Sequence
  Description of Artificial Sequence: Synthetic polynucleotide
ggttcttccgaaagcggttcttccgagggcggtccaggttccggtggtgaaccatctgaatctggtagctcaggttcttctgaaagcggttcttctgaaggtggtcca

SEQ ID NO: 270 - protein, 36 aa, Artificial Sequence
  Description of Artificial Sequence: Synthetic polypeptide
GSEGSSGPGESSGESPGGSSGSESGSEGSSGPGESS

SEQ ID NO: 271 - DNA, 108 bp, Artificial Sequence
  Description of Artificial Sequence: Synthetic polynucleotide
ggtagcgaaggttcttccggtcctggtgagtcttcaggtgaatctccaggtggctctagcggttccgagtcaggtagcgaaggttcttctggtcctggcgagtcctca

SEQ ID NO: 272 - protein, 36 aa, Artificial Sequence; identical to SEQ ID NO: 242
  Description of Artificial Sequence: Synthetic polypeptide

SEQ ID NO: 273 - DNA, 108 bp, Artificial Sequence
  Description of Artificial Sequence: Synthetic polynucleotide
ggttcctctgaaagcggttcttccgaaggcggtccaggttcttccgaaagcggttcttctgagggcggtccaggttcctccgaaagcggttcttctgagggtggtcca

SEQ ID NO: 274 - protein, 36 aa, Artificial Sequence; identical to SEQ ID NO: 226
  Description of Artificial Sequence: Synthetic polypeptide

SEQ ID NO: 275 - DNA, 108 bp, Artificial Sequence
  Description of Artificial Sequence: Synthetic polynucleotide
ggttctggtggcgaaccttccgagtctggtagctcaggtgaatctccgggtggttctagcggttccgagtcaggtgaatctccgggtggttccagcggttctgagtca

SEQ ID NO: 276 - protein, 36 aa, Artificial Sequence
  Description of Artificial Sequence: Synthetic polypeptide
GSGGEPSESGSSGSEGSSGPGESSGESPGGSSGSES

SEQ ID NO: 277 - DNA, 108 bp, Artificial Sequence
  Description of Artificial Sequence: Synthetic polynucleotide
ggttctggtggcgaaccatctgagtctggtagctcaggtagcgaaggttcttccggtccaggcgagtcttcaggtgaatctcctggtggctccagcggttctgagtca

SEQ ID NO: 278 - protein, 36 aa, Artificial Sequence
  Description of Artificial Sequence: Synthetic polypeptide
GESPGGSSGSESGESPGGSSGSESGESPGGSSGSES

SEQ ID NO: 279 - DNA, 108 bp, Artificial Sequence
  Description of Artificial Sequence: Synthetic polynucleotide
ggtgaatctcctggtggttccagcggttccgagtcaggtgaatctccaggtggctctagcggttccgagtcaggtgaatctcctggtggttctagcggttctgaatca

SEQ ID NO: 280 - protein, 36 aa, Artificial Sequence
  Description of Artificial Sequence: Synthetic polypeptide
GSEGSSGPGESSGSEGSSGPGESSGSGGEPSESGSS

SEQ ID NO: 281 - DNA, 108 bp, Artificial Sequence
  Description of Artificial Sequence: Synthetic polynucleotide
ggtagcgaaggttcttccggtccaggtgaatcttcaggtagcgaaggttcttctggtcctggtgaatcctcaggttccggtggcgaaccatctgaatctggtagctca

SEQ ID NO: 282 - protein, 36 aa, Artificial Sequence; identical to SEQ ID NO: 276
  Description of Artificial Sequence: Synthetic polypeptide

SEQ ID NO: 283 - DNA, 108 bp, Artificial Sequence
  Description of Artificial Sequence: Synthetic polynucleotide
ggttctggtggcgaaccatccgaatctggtagctcaggtagcgaaggttcttctggtcctggcgaatcttcaggtgaatctccaggtggctctagcggttccgaatca

SEQ ID NO: 284 - protein, 36 aa, Artificial Sequence; identical to SEQ ID NO: 232
  Description of Artificial Sequence: Synthetic polypeptide

SEQ ID NO: 285 - DNA, 108 bp, Artificial Sequence
  Description of Artificial Sequence: Synthetic polynucleotide
ggttccggtggtgaaccgtccgaatctggtagctcaggttcctctgaaagcggttcttccgagggtggtccaggttccggtggtgaaccttctgagtctggtagctca

SEQ ID NO: 286 - protein, 36 aa, Artificial Sequence
  Description of Artificial Sequence: Synthetic polypeptide
GSSESGSSEGGPGSGGEPSESGSSGSEGSSGPGESS

SEQ ID NO: 287 - DNA, 108 bp, Artificial Sequence
  Description of Artificial Sequence: Synthetic polynucleotide
ggttcctctgaaagcggttcttctgagggcggtccaggttctggtggcgaaccatctgaatctggtagctcaggtagcgaaggttcttccggtccgggtgaatcttca

SEQ ID NO: 288 - protein, 36 aa, Artificial Sequence
  Description of Artificial Sequence: Synthetic polypeptide
GSGGEPSESGSSGSEGSSGPGESSGSEGSSGPGESS

SEQ ID NO: 289 - DNA, 108 bp, Artificial Sequence
  Description of Artificial Sequence: Synthetic polynucleotide
ggttctggtggtgaaccgtccgaatctggtagctcaggtagcgaaggttcttctggtcctggcgagtcttcaggtagcgaaggttcttctggtcctggtgaatcttca

SEQ ID NO: 290 - protein, 36 aa, Artificial Sequence; identical to SEQ ID NO: 232
  Description of Artificial Sequence: Synthetic polypeptide

SEQ ID NO: 291 - DNA, 108 bp, Artificial Sequence
  Description of Artificial Sequence: Synthetic polynucleotide
ggttctggtggcgaaccatccgagtctggtagctcaggttcttccgaaagcggttcttccgaaggcggtccaggttctggtggtgaaccgtccgaatctggtagctca

SEQ ID NO: 292 - protein, 36 aa, Artificial Sequence; identical to SEQ ID NO: 226
  Description of Artificial Sequence: Synthetic polypeptide

SEQ ID NO: 293 - DNA, 108 bp, Artificial Sequence
  Description of Artificial Sequence: Synthetic polynucleotide
ggttccggtggcgaaccttccgaatctggtagctcaggtgaatctccgggtggttctagcggttccgaatcaggtgaatctccaggtggttctagcggttccgaatca

SEQ ID NO: 294 - protein, 36 aa, Artificial Sequence
  Description of Artificial Sequence: Synthetic polypeptide
GSGGEPSESGSSGSGGEPSESGSSGESPGGSSGSES

SEQ ID NO: 295 - DNA, 108 bp, Artificial Sequence
  Description of Artificial Sequence: Synthetic polynucleotide
ggttccggtggtgaaccatctgagtctggtagctcaggttccggtggcgaaccgtccgagtctggtagctcaggtgaatctccgggtggttccagcggttccgaatca

SEQ ID NO: 296 - protein, 36 aa, Artificial Sequence
  Description of Artificial Sequence: Synthetic polypeptide
GSEGSSGPGESSGSSESGSSEGGPGSEGSSGPGESS

SEQ ID NO: 297 - DNA, 108 bp, Artificial Sequence
  Description of Artificial Sequence: Synthetic polynucleotide
ggtagcgaaggttcttctggtccgggcgaatcctcaggttcctccgaaagcggttcttccgaaggtggtccaggtagcgaaggttcttccggtcctggtgaatcttca

SEQ ID NO: 298 - protein, 36 aa, Artificial Sequence
  Description of Artificial Sequence: Synthetic polypeptide
GSSESGSSEGGPGESPGGSSGSESGESPGGSSGSES

SEQ ID NO: 299 - DNA, 108 bp, Artificial Sequence
  Description of Artificial Sequence: Synthetic polynucleotide
ggttcctctgaaagcggttcttctgaaggcggtccaggtgaatctccgggtggctccagcggttctgaatcaggtgaatctcctggtggctccagcggttccgagtca

SEQ ID NO: 300 - protein, 36 aa, Artificial Sequence; identical to SEQ ID NO: 280
  Description of Artificial Sequence: Synthetic polypeptide

SEQ ID NO: 301 - DNA, 108 bp, Artificial Sequence
  Description of Artificial Sequence: Synthetic polynucleotide
ggtagcgaaggttcttctggtccaggcgagtcttcaggtagcgaaggttcttccggtcctggcgagtcttcaggttccggtggcgaaccgtccgaatctggtagctca

SEQ ID NO: 302 - protein, 12 aa, Artificial Sequence
  Description of Artificial Sequence: Synthetic peptide
GSPAGSPTSTEE

SEQ ID NO: 303 - protein, 12 aa, Artificial Sequence
  Description of Artificial Sequence: Synthetic peptide
GSEPATSGSETP

SEQ ID NO: 304 - protein, 12 aa, Artificial Sequence
  Description of Artificial Sequence: Synthetic peptide
GTSESATPESGP

SEQ ID NO: 305 - protein, 12 aa, Artificial Sequence
  Description of Artificial Sequence: Synthetic peptide
GTSTEPSEGSAP

SEQ ID NO: 306 - DNA, 36 bp, Artificial Sequence
  Description of Artificial Sequence: Synthetic oligonucleotide
aggtagcccdgcwggytctccdacytcyacygarga

SEQ ID NO: 307 - DNA, 36 bp, Artificial Sequence
  Description of Artificial Sequence: Synthetic oligonucleotide
accttcytcrgtrgargthggagarccwgchgggct

SEQ ID NO: 308 - DNA, 36 bp, Artificial Sequence
  Description of Artificial Sequence: Synthetic oligonucleotide
aggtagcgaacckgcwacytcyggytctgaracycc

SEQ ID NO: 309 - DNA, 36 bp, Artificial Sequence
  Description of Artificial Sequence: Synthetic oligonucleotide
acctggrgtytcagarccrgargtwgcmggttcgct

SEQ ID NO: 310 - DNA, 36 bp, Artificial Sequence
  Description of Artificial Sequence: Synthetic oligonucleotide
aggtacytctgaaagcgcwacycckgartcyggycc

SEQ ID NO: 311 - DNA, 36 bp, Artificial Sequence
  Description of Artificial Sequence: Synthetic oligonucleotide
acctggrccrgaytcmggrgtwgcgctttcagargt

SEQ ID NO: 312 - DNA, 36 bp, Artificial Sequence
  Description of Artificial Sequence: Synthetic oligonucleotide
aggtacytctacygaaccktcygarggyagcgcwcc

SEQ ID NO: 313 - DNA, 36 bp, Artificial Sequence
  Description of Artificial Sequence: Synthetic oligonucleotide
acctggwgcgctrccytcrgamggttcrgtagargt

SEQ ID NO: 314 - DNA, 24 bp, Artificial Sequence
  Description of Artificial Sequence: Synthetic oligonucleotide
aggttcgtcttcactcgagggtac

SEQ ID NO: 315 - DNA, 16 bp, Artificial Sequence
  Description of Artificial Sequence: Synthetic oligonucleotide
cctcgagtgaagacga

SEQ ID NO: 316 - protein, 36 aa, Artificial Sequence
  Description of Artificial Sequence: Synthetic polypeptide
GSPAGSPTSTEEGTSESATPESGPGTSTEPSEGSAP

SEQ ID NO: 317 - DNA, 108 bp, Artificial Sequence
  Description of Artificial Sequence: Synthetic polynucleotide
ggtagcccggcaggctctccgacctctactgaggaaggtacttctgaaagcgcaaccccggagtccggcccaggtacctctaccgaaccgtctgagggcagcgcacca

SEQ ID NO: 318 - protein, 36 aa, Artificial Sequence
  Description of Artificial Sequence: Synthetic polypeptide
GTSTEPSEGSAPGTSTEPSEGSAPGTSTEPSEGSAP

SEQ ID NO: 319 - DNA, 108 bp, Artificial Sequence
  Description of Artificial Sequence: Synthetic polynucleotide
ggtacttctaccgaaccgtccgaaggcagcgctccaggtacctctactgaaccttccgagggcagcgctccaggtacctctaccgaaccttctgaaggtagcgcacca

SEQ ID NO: 320 - protein, 36 aa, Artificial Sequence
  Description of Artificial Sequence: Synthetic polypeptide
GTSTEPSEGSAPGTSESATPESGPGTSESATPESGP

SEQ ID NO: 321 - DNA, 108 bp, Artificial Sequence
  Description of Artificial Sequence: Synthetic polynucleotide
ggtacctctaccgaaccgtctgaaggtagcgcaccaggtacctctgaaagcgcaactcctgagtccggtccaggtacttctgaaagcgcaaccccggagtctggccca

SEQ ID NO: 322 - protein, 36 aa, Artificial Sequence; identical to SEQ ID NO: 320
  Description of Artificial Sequence: Synthetic polypeptide

SEQ ID NO: 323 - DNA, 108 bp, Artificial Sequence
  Description of Artificial Sequence: Synthetic polynucleotide
ggtacttctactgaaccgtctgaaggtagcgcaccaggtacttctgaaagcgcaaccccggaatccggcccaggtacctctgaaagcgcaaccccggagtccggccca

SEQ ID NO: 324 - protein, 36 aa, Artificial Sequence
  Description of Artificial Sequence: Synthetic polypeptide
GSEPATSGSETPGTSESATPESGPGSPAGSPTSTEE

SEQ ID NO: 325 - DNA, 108 bp, Artificial Sequence
  Description of Artificial Sequence: Synthetic polynucleotide
ggtagcgaaccggcaacctccggctctgaaaccccaggtacctctgaaagcgctactcctgaatccggcccaggtagcccggcaggttctccgacttccactgaggaa

SEQ ID NO: 326 - protein, 36 aa, Artificial Sequence
  Description of Artificial Sequence: Synthetic polypeptide
GTSESATPESGPGSEPATSGSETPGTSTEPSEGSAP

SEQ ID NO: 327 - DNA, 108 bp, Artificial Sequence
  Description of Artificial Sequence: Synthetic polynucleotide
ggtacttctgaaagcgcaacccctgaatccggtccaggtagcgaaccggctacttctggctctgagactccaggtacttctaccgaaccgtccgaaggtagcgcacca

SEQ ID NO: 328 - protein, 36 aa, Artificial Sequence
  Description of Artificial Sequence: Synthetic polypeptide
GSPAGSPTSTEEGSPAGSPTSTEEGSEPATSGSETP

SEQ ID NO: 329 - DNA, 108 bp, Artificial Sequence
  Description of Artificial Sequence: Synthetic polynucleotide
ggtagcccggctggctctccaacctccactgaggaaggtagcccggctggctctccaacctccactgaagaaggtagcgaaccggctacctccggctctgaaactcca

SEQ ID NO: 330 - protein, 36 aa, Artificial Sequence; identical to SEQ ID NO: 316
  Description of Artificial Sequence: Synthetic polypeptide

SEQ ID NO: 331 - DNA, 108 bp, Artificial Sequence
  Description of Artificial Sequence: Synthetic polynucleotide
ggtagcccggctggctctcctacctctactgaggaaggtacttctgaaagcgctactcctgagtctggtccaggtacctctactgaaccgtccgaaggtagcgctcca

SEQ ID NO: 332 - protein, 36 aa, Artificial Sequence
  Description of Artificial Sequence: Synthetic polypeptide
GSPAGSPTSTEEGSPAGSPTSTEEGTSTEPSEGSAP

SEQ ID NO: 333 - DNA, 108 bp, Artificial Sequence
  Description of Artificial Sequence: Synthetic polynucleotide
ggtagccctgctggctctccgacttctactgaggaaggtagcccggctggttctccgacttctactgaggaaggtacttctaccgaaccttccgaaggtagcgctcca

SEQ ID NO: 334 - protein, 36 aa, Artificial Sequence
  Description of Artificial Sequence: Synthetic polypeptide
GTSESATPESGPGTSTEPSEGSAPGTSTEPSEGSAP

SEQ ID NO: 335 - DNA, 108 bp, Artificial Sequence
  Description of Artificial Sequence: Synthetic polynucleotide
ggtacttctgaaagcgctactccggagtccggtccaggtacctctaccgaaccgtccgaaggcagcgctccaggtacttctactgaaccttctgagggtagcgctcca

SEQ ID NO: 336 - protein, 36 aa, Artificial Sequence
  Description of Artificial Sequence: Synthetic polypeptide
GTSTEPSEGSAPGSPAGSPTSTEEGTSTEPSEGSAP

SEQ ID NO: 337 - DNA, 108 bp, Artificial Sequence
  Description of Artificial Sequence: Synthetic polynucleotide
ggtacctctaccgaaccttccgaaggtagcgctccaggtagcccggcaggttctcctacttccactgaggaaggtacttctaccgaaccttctgagggtagcgcacca

SEQ ID NO: 338 - protein, 36 aa, Artificial Sequence
  Description of Artificial Sequence: Synthetic polypeptide
GSEPATSGSETPGSPAGSPTSTEEGTSESATPESGP

SEQ ID NO: 339 - DNA, 108 bp, Artificial Sequence
  Description of Artificial Sequence: Synthetic polynucleotide
ggtagcgaaccggctacttccggctctgagactccaggtagccctgctggctctccgacctctaccgaagaaggtacctctgaaagcgctacccctgagtctggccca

SEQ ID NO: 340 - protein, 36 aa, Artificial Sequence; identical to SEQ ID NO: 320
  Description of Artificial Sequence: Synthetic polypeptide

SEQ ID NO: 341 - DNA, 108 bp, Artificial Sequence
  Description of Artificial Sequence: Synthetic polynucleotide
ggtacttctaccgaaccttccgagggcagcgcaccaggtacttctgaaagcgctacccctgagtccggcccaggtacttctgaaagcgctactcctgaatccggtcca

SEQ ID NO: 342 - protein, 36 aa, Artificial Sequence
  Description of Artificial Sequence: Synthetic polypeptide
GTSTEPSEGSAPGSEPATSGSETPGSPAGSPTSTEE

SEQ ID NO: 343 - DNA, 108 bp, Artificial Sequence
  Description of Artificial Sequence: Synthetic polynucleotide
ggtacttctactgaaccgtctgaaggcagcgcaccaggtagcgaaccggctacttccggttctgaaaccccaggtagcccagcaggttctccaacttctactgaagaa

SEQ ID NO: 344 - protein, 36 aa, Artificial Sequence
  Description of Artificial Sequence: Synthetic polypeptide
GSPAGSPTSTEEGTSESATPESGPGSEPATSGSETP

SEQ ID NO: 345 - DNA, 108 bp, Artificial Sequence
  Description of Artificial Sequence: Synthetic polynucleotide
ggtagccctgctggctctccaacctccaccgaagaaggtacctctgaaagcgcaacccctgaatccggcccaggtagcgaaccggcaacctccggttctgaaacccca

SEQ ID NO: 346 - protein, 36 aa, Artificial Sequence
  Description of Artificial Sequence: Synthetic polypeptide
GTSESATPESGPGSPAGSPTSTEEGSPAGSPTSTEE

SEQ ID NO: 347 - DNA, 108 bp, Artificial Sequence
  Description of Artificial Sequence: Synthetic polynucleotide
ggtacttctgaaagcgctactcctgagtccggcccaggtagcccggctggctctccgacttccaccgaggaaggtagcccggctggctctccaacttctactgaagaa

SEQ ID NO: 348 - protein, 36 aa, Artificial Sequence
  Description of Artificial Sequence: Synthetic polypeptide
GTSTEPSEGSAPGTSESATPESGPGTSTEPSEGSAP

SEQ ID NO: 349 - DNA, 108 bp, Artificial Sequence
  Description of Artificial Sequence: Synthetic polynucleotide
ggtacctctactgaaccttctgagggcagcgctccaggtacttctgaaagcgctaccccggagtccggtccaggtacttctactgaaccgtccgaaggtagcgcacca

SEQ ID NO: 350 - protein, 36 aa, Artificial Sequence
  Description of Artificial Sequence: Synthetic polypeptide
GSPAGSPTSTEEGTSTEPSEGSAPGSEPATSGSETP

SEQ ID NO: 351 - DNA, 108 bp, Artificial Sequence
  Description of Artificial Sequence: Synthetic polynucleotide
ggtagcccggcaggctctccgacttccaccgaggaaggtacctctactgaaccttctgagggtagcgctccaggtagcgaaccggcaacctctggctctgaaacccca

SEQ ID NO: 352 - protein, 36 aa, Artificial Sequence
  Description of Artificial Sequence: Synthetic polypeptide
GSPAGSPTSTEEGTSTEPSEGSAPGTSTEPSEGSAP

SEQ ID NO: 353 - DNA, 108 bp, Artificial Sequence
  Description of Artificial Sequence: Synthetic polynucleotide
ggtagcccagcaggctctccgacttccactgaggaaggtacttctactgaaccttccgaaggcagcgcaccaggtacctctactgaaccttctgagggcagcgctcca

SEQ ID NO: 354 - protein, 36 aa, Artificial Sequence; identical to SEQ ID NO: 324
  Description of Artificial Sequence: Synthetic polypeptide

SEQ ID NO: 355 - DNA, 108 bp, Artificial Sequence
  Description of Artificial Sequence: Synthetic polynucleotide
ggtagcgaacctgctacctccggttctgaaaccccaggtacctctgaaagcgcaactccggagtctggtccaggtagccctgcaggttctcctacctccactgaggaa

SEQ ID NO: 356 - protein, 36 aa, Artificial Sequence; identical to SEQ ID NO: 334
  Description of Artificial Sequence: Synthetic polypeptide

SEQ ID NO: 357 - DNA, 108 bp, Artificial Sequence
  Description of Artificial Sequence: Synthetic polynucleotide
ggtacctctgaaagcgctactccggagtctggcccaggtacctctactgaaccgtctgagggtagcgctccaggtacttctactgaaccgtccgaaggtagcgcacca

SEQ ID NO: 358 - protein, 36 aa, Artificial Sequence; identical to SEQ ID NO: 352
  Description of Artificial Sequence: Synthetic polypeptide

SEQ ID NO: 359 - DNA, 108 bp, Artificial Sequence
  Description of Artificial Sequence: Synthetic polynucleotide
ggtagcccggctggttctccgacttccaccgaggaaggtacctctactgaaccttctgagggtagcgctccaggtacctctactgaaccttccgaaggcagcgctcca

SEQ ID NO: 360 - protein, 36 aa, Artificial Sequence; identical to SEQ ID NO: 318
  Description of Artificial Sequence: Synthetic polypeptide

SEQ ID NO: 361 - DNA, 108 bp, Artificial Sequence
  Description of Artificial Sequence: Synthetic polynucleotide
ggtacttctaccgaaccgtccgagggcagcgctccaggtacttctactgaaccttctgaaggcagcgctccaggtacttctactgaaccttccgaaggtagcgcacca

SEQ ID NO: 362 - protein, 36 aa, Artificial Sequence
  Description of Artificial Sequence: Synthetic polypeptide
GSEPATSGSETPGTSESATPESGPGTSTEPSEGSAP

SEQ ID NO: 363 - DNA, 108 bp, Artificial Sequence
  Description of Artificial Sequence: Synthetic polynucleotide
ggtagcgaacctgcaacctctggctctgaaaccccaggtacctctgaaagcgctactcctgaatctggcccaggtacttctactgaaccgtccgagggcagcgcacca

SEQ ID NO: 364 - protein, 36 aa, Artificial Sequence; identical to SEQ ID NO: 336
  Description of Artificial Sequence: Synthetic polypeptide

SEQ ID NO: 365 - DNA, 108 bp, Artificial Sequence
  Description of Artificial Sequence: Synthetic polynucleotide
ggtacttctaccgaaccgtccgagggtagcgcaccaggtagcccagcaggttctcctacctccaccgaggaaggtacttctaccgaaccgtccgagggtagcgcacca

SEQ ID NO: 366 - protein, 36 aa, Artificial Sequence
  Description of Artificial Sequence: Synthetic polypeptide
GSEPATSGSETPGTSESATPESGPGSEPATSGSETP

SEQ ID NO: 367 - DNA, 108 bp, Artificial Sequence
  Description of Artificial Sequence: Synthetic polynucleotide
ggtagcgaaccggcaacctccggctctgaaactccaggtacttctgaaagcgctactccggaatccggcccaggtagcgaaccggctacttccggctctgaaacccca

SEQ ID NO: 368 - protein, 36 aa, Artificial Sequence; identical to SEQ ID NO: 366
  Description of Artificial Sequence: Synthetic polypeptide

SEQ ID NO: 369 - DNA, 108 bp, Artificial Sequence
  Description of Artificial Sequence: Synthetic polynucleotide
ggtagcgaaccggcaacttccggctctgaaaccccaggtacttctgaaagcgctactcctgagtctggcccaggtagcgaacctgctacctctggctctgaaacccca

SEQ ID NO: 370 - protein, 36 aa, Artificial Sequence
  Description of Artificial Sequence: Synthetic polypeptide
GSEPATSGSETPGSEPATSGSETPGTSTEPSEGSAP

SEQ ID NO: 371 - DNA, 108 bp, Artificial Sequence
  Description of Artificial Sequence: Synthetic polynucleotide
ggtagcgaaccggcaacctctggctctgaaactccaggtagcgaacctgcaacctccggctctgaaaccccaggtacttctactgaaccttctgagggcagcgcacca

SEQ ID NO: 372 - protein, 36 aa, Artificial Sequence
  Description of Artificial Sequence: Synthetic polypeptide
GTSESATPESGPGSEPATSGSETPGSEPATSGSETP

SEQ ID NO: 373 - DNA, 108 bp, Artificial Sequence
  Description of Artificial Sequence: Synthetic polynucleotide
ggtacttctgaaagcgctaccccggaatctggcccaggtagcgaaccggctacttctggttctgaaaccccaggtagcgaaccggctacctccggttctgaaactcca

SEQ ID NO: 374 - protein, 36 aa, Artificial Sequence
  Description of Artificial Sequence: Synthetic polypeptide
GTSTEPSEGSAPGTSTEPSEGSAPGTSESATPESGP

SEQ ID NO: 375 - DNA, 108 bp, Artificial Sequence
  Description of Artificial Sequence: Synthetic polynucleotide
ggtacctctactgaaccttccgaaggcagcgctccaggtacctctaccgaaccgtccgagggcagcgcaccaggtacttctgaaagcgcaacccctgaatccggtcca

SEQ ID NO: 376 - protein, 36 aa, Artificial Sequence
  Description of Artificial Sequence: Synthetic polypeptide
GSEPATSGSETPGTSESATPESGPGTSESATPESGP

SEQ ID NO: 377 - DNA, 108 bp, Artificial Sequence
  Description of Artificial Sequence: Synthetic polynucleotide
ggtagcgaaccggcaacctctggctctgaaaccccaggtacctctgaaagcgctactccggaatctggtccaggtacttctgaaagcgctactccggaatccggtcca

SEQ ID NO: 378 - protein, 36 aa, Artificial Sequence; identical to SEQ ID NO: 370
  Description of Artificial Sequence: Synthetic polypeptide

SEQ ID NO: 379 - DNA, 108 bp, Artificial Sequence
  Description of Artificial Sequence: Synthetic polynucleotide
ggtagcgaacctgctacctccggctctgaaactccaggtagcgaaccggctacttccggttctgaaactccaggtacctctaccgaaccttccgaaggcagcgcacca

SEQ ID NO: 380 - protein, 36 aa, Artificial Sequence
  Description of Artificial Sequence: Synthetic polypeptide
GSEPATSGSETPGTSTEPSEGSAPGSEPATSGSETP

SEQ ID NO: 381 - DNA, 108 bp, Artificial Sequence
  Description of Artificial Sequence: Synthetic polynucleotide
ggtagcgaacctgctacttctggttctgaaactccaggtacttctaccgaaccgtccgagggtagcgctccaggtagcgaacctgctacttctggttctgaaactcca

SEQ ID NO: 382 - protein, 36 aa, Artificial Sequence
  Description of Artificial Sequence: Synthetic polypeptide
GTSTEPSEGSAPGTSTEPSEGSAPGSEPATSGSETP

SEQ ID NO: 383 - DNA, 108 bp, Artificial Sequence
  Description of Artificial Sequence: Synthetic polynucleotide
ggtacctctaccgaaccgtccgagggtagcgcaccaggtacctctactgaaccgtctgagggtagcgctccaggtagcgaaccggcaacctccggttctgaaactcca

SEQ ID NO: 384 - protein, 36 aa, Artificial Sequence; identical to SEQ ID NO: 342
  Description of Artificial Sequence: Synthetic polypeptide

SEQ ID NO: 385 - DNA, 108 bp, Artificial Sequence
  Description of Artificial Sequence: Synthetic polynucleotide
ggtacttctactgaaccttccgaaggtagcgctccaggtagcgaacctgctacttctggttctgaaaccccaggtagcccggctggctctccgacctccaccgaggaa

SEQ ID NO: 386 - protein, 36 aa, Artificial Sequence; identical to SEQ ID NO: 338
  Description of Artificial Sequence: Synthetic polypeptide

SEQ ID NO: 387 - DNA, 108 bp, Artificial Sequence
  Description of Artificial Sequence: Synthetic polynucleotide
ggtagcgaaccggctacttccggctctgagactccaggtagcccagctggttctccaacctctactgaggaaggtacttctgaaagcgctacccctgaatctggtcca

SEQ ID NO: 388 - protein, 36 aa, Artificial Sequence
  Description of Artificial Sequence: Synthetic polypeptide
GTSESATPESGPGSEPATSGSETPGTSESATPESGP

SEQ ID NO: 389 - DNA, 108 bp, Artificial Sequence
  Description of Artificial Sequence: Synthetic polynucleotide
ggtacctctgaaagcgcaactcctgagtctggcccaggtagcgaacctgctacctccggctctgagactccaggtacctctgaaagcgcaaccccggaatctggtcca

SEQ ID NO: 390 - protein, 12 aa, Artificial Sequence
  Description of Artificial Sequence: Synthetic peptide
GSTSESPSGTAP

SEQ ID NO: 391 - protein, 12 aa, Artificial Sequence
  Description of Artificial Sequence: Synthetic peptide
GTSTPESGSASP

SEQ ID NO: 392 - protein, 12 aa, Artificial Sequence
  Description of Artificial Sequence: Synthetic peptide
GTSPSGESSTAP

SEQ ID NO: 393 - protein, 12 aa, Artificial Sequence
  Description of Artificial Sequence: Synthetic peptide
GSTSSTAESPGP

SEQ ID NO: 394 - DNA, 36 bp, Artificial Sequence
  Description of Artificial Sequence: Synthetic oligonucleotide
aggttctacyagcgaatcyccktctggyacygcwcc

SEQ ID NO: 395 - DNA, 36 bp, Artificial Sequence
  Description of Artificial Sequence: Synthetic oligonucleotide
acctggwgcrgtrccagamggrgattcgctrgtaga

SEQ ID NO: 396 - DNA, 36 bp, Artificial Sequence
  Description of Artificial Sequence: Synthetic oligonucleotide
aggtacytctacycckgaaagcggytcygcwtctcc

SEQ ID NO: 397 - DNA, 36 bp, Artificial Sequence
  Description of Artificial Sequence: Synthetic oligonucleotide
acctggagawgcrgarccgctttcmggrgtagargt

SEQ ID NO: 398 - DNA, 36 bp, Artificial Sequence
  Description of Artificial Sequence: Synthetic oligonucleotide
aggtacytcycckagcggygaatcttctacygcwcc

SEQ ID NO: 399 - DNA, 36 bp, Artificial Sequence
  Description of Artificial Sequence: Synthetic oligonucleotide
acctggwgcrgtagaagattcrccgctmggrgargt

SEQ ID NO: 400 - DNA, 36 bp, Artificial Sequence
  Description of Artificial Sequence: Synthetic oligonucleotide
aggttcyacyagctctacygcwgaatctcckggycc

SEQ ID NO: 401 - DNA, 36 bp, Artificial Sequence
  Description of Artificial Sequence: Synthetic oligonucleotide
acctggrccmggagattcwgcrgtagagctrgtrga

SEQ ID NO: 402 - DNA, 24 bp, Artificial Sequence
  Description of Artificial Sequence: Synthetic oligonucleotide
aggttcgtcttcactcgagggtac

SEQ ID NO: 403 - DNA, 16 bp, Artificial Sequence
  Description of Artificial Sequence: Synthetic oligonucleotide
cctcgagtgaagacga

SEQ ID NO: 404 - protein, 36 aa, Artificial Sequence
  Description of Artificial Sequence: Synthetic polypeptide
GTSTPESGSASPGTSPSGESSTAPGTSPSGESSTAP

SEQ ID NO: 405 - DNA, 108 bp, Artificial Sequence
  Description of Artificial Sequence: Synthetic polynucleotide
ggtacttctactccggaaagcggttccgcatctccaggtacttctcctagcggtgaatcttctactgctccaggtacctctcctagcggcgaatcttctactgctcca

SEQ ID NO: 406 - protein, 36 aa, Artificial Sequence
  Description of Artificial Sequence: Synthetic polypeptide
GTSPSGESSTAPGSTSSTAESPGPGTSPSGESSTAP

SEQ ID NO: 407 - DNA, 108 bp, Artificial Sequence
  Description of Artificial Sequence: Synthetic polynucleotide
ggtacttctccgagcggtgaatcttctaccgcaccaggttctactagctctaccgctgaatctccgggcccaggtacttctccgagcggtgaatcttctactgctcca

SEQ ID NO: 408 - protein, 36 aa, Artificial Sequence
  Description of Artificial Sequence: Synthetic polypeptide
GSTSSTAESPGPGTSPSGESSTAPGTSTPESGSASP

SEQ ID NO: 409 - DNA, 108 bp, Artificial Sequence
  Description of Artificial Sequence: Synthetic polynucleotide
ggttccaccagctctactgctgaatctcctggtccaggtacctctcctagcggtgaatcttctactgctccaggtacttctactcctgaaagcggctctgcttctcca

SEQ ID NO: 410 - protein, 36 aa, Artificial Sequence
  Description of Artificial Sequence: Synthetic polypeptide
GSTSSTAESPGPGSTSSTAESPGPGTSPSGESSTAP

SEQ ID NO: 411 - DNA, 108 bp, Artificial Sequence
  Description of Artificial Sequence: Synthetic polynucleotide
ggttctaccagctctactgcagaatctcctggcccaggttccaccagctctaccgcagaatctccgggtccaggtacttcccctagcggtgaatcttctaccgcacca

SEQ ID NO: 412 - protein, 36 aa, Artificial Sequence; identical to SEQ ID NO: 408
  Description of Artificial Sequence: Synthetic polypeptide

SEQ ID NO: 413 - DNA, 108 bp, Artificial Sequence
  Description of Artificial Sequence: Synthetic polynucleotide
ggttctactagctctactgctgaatctcctggcccaggtacttctcctagcggtgaatcttctaccgctccaggtacctctactccggaaagcggttctgcatctcca

SEQ ID NO: 414 - protein, 36 aa, Artificial Sequence
  Description of Artificial Sequence: Synthetic polypeptide
GSTSSTAESPGPGTSTPESGSASPGSTSESPSGTAP

SEQ ID NO: 415 - DNA, 108 bp, Artificial Sequence
  Description of Artificial Sequence: Synthetic polynucleotide
ggttctaccagctctaccgcagaatctcctggtccaggtacctctactccggaaagcggctctgcatctccaggttctactagcgaatctccttctggcactgcacca

SEQ ID NO: 416 - protein, 36 aa, Artificial Sequence
  Description of Artificial Sequence: Synthetic polypeptide
GSTSSTAESPGPGTSTPESGSASPGTSTPESGSASP

SEQ ID NO: 417 - DNA, 108 bp, Artificial Sequence
  Description of Artificial Sequence: Synthetic polynucleotide
ggttctactagctctactgcagaatctcctggcccaggtacctctactccggaaagcggctctgcatctccaggtacttctacccctgaaagcggttctgcatctcca

SEQ ID NO: 418 - protein, 36 aa, Artificial Sequence
  Description of Artificial Sequence: Synthetic polypeptide
GSTSESPSGTAPGTSPSGESSTAPGSTSESPSGTAP

SEQ ID NO: 419 - DNA, 108 bp, Artificial Sequence
  Description of Artificial Sequence: Synthetic polynucleotide
ggttctaccagcgaatctccttctggcaccgctccaggtacctctcctagcggcgaatcttctaccgctccaggttctactagcgaatctccttctggcactgcacca

SEQ ID NO: 420 - protein, 36 aa, Artificial Sequence; identical to SEQ ID NO: 410
  Description of Artificial Sequence: Synthetic polypeptide

SEQ ID NO: 421 - DNA, 108 bp, Artificial Sequence
  Description of Artificial Sequence: Synthetic polynucleotide
ggttccaccagctctactgcagaatctccgggcccaggttctactagctctactgcagaatctccgggtccaggtacttctcctagcggcgaatcttctaccgctcca

SEQ ID NO: 422 - protein, 36 aa, Artificial Sequence; identical to SEQ ID NO: 414
  Description of Artificial Sequence: Synthetic polypeptide

SEQ ID NO: 423 - DNA, 108 bp, Artificial Sequence
  Description of Artificial Sequence: Synthetic polynucleotide
ggttccactagctctactgcagaatctcctggcccaggtacctctacccctgaaagcggctctgcatctccaggttctaccagcgaatccccgtctggcaccgcacca

SEQ ID NO: 424 - protein, 36 aa, Artificial Sequence; identical to SEQ ID NO: 410
  Description of Artificial Sequence: Synthetic polypeptide

SEQ ID NO: 425 - DNA, 108 bp, Artificial Sequence
  Description of Artificial Sequence: Synthetic polynucleotide
ggttctactagctctactgctgaatctccgggtccaggttctaccagctctactgctgaatctcctggtccaggtacctccccgagcggtgaatcttctactgcacca

SEQ ID NO: 426 - protein, 36 aa, Artificial Sequence
  Description of Artificial Sequence: Synthetic polypeptide
GSTSSTAESPGPGSTSESPSGTAPGSTSSTAESPGP

SEQ ID NO: 427 - DNA, 108 bp, Artificial Sequence
  Description of Artificial Sequence: Synthetic polynucleotide
ggttctaccagctctaccgctgaatctcctggcccaggttctaccagcgaatccccgtctggcaccgcaccaggttctactagctctaccgctgaatctccgggtcca

SEQ ID NO: 428 - protein, 36 aa, Artificial Sequence
  Description of Artificial Sequence: Synthetic polypeptide
GSTSSTAESPGPGSTSSTAESPGPGSTSSTAESPGP

SEQ ID NO: 429 - DNA, 108 bp, Artificial Sequence
  Description of Artificial Sequence: Synthetic polynucleotide
ggttctaccagctctaccgcagaatctcctggcccaggttccactagctctaccgctgaatctcctggtccaggttctactagctctaccgctgaatctcctggtcca

SEQ ID NO: 430 - protein, 36 aa, Artificial Sequence
  Description of Artificial Sequence: Synthetic polypeptide
GSTSESPSGTAPGSTSSTAESPGPGSTSSTAESPGP

SEQ ID NO: 431 - DNA, 108 bp, Artificial Sequence
  Description of Artificial Sequence: Synthetic polynucleotide
ggttctactagcgaatccccttctggtactgctccaggttccactagctctaccgctgaatctcctggcccaggttccactagctctactgcagaatctcctggtcca

SEQ ID NO: 432 - protein, 36 aa, Artificial Sequence
  Description of Artificial Sequence: Synthetic polypeptide
GSTSESPSGTAPGSTSESPSGTAPGSTSESPSGTAP

SEQ ID NO: 433 - DNA, 108 bp, Artificial Sequence
  Description of Artificial Sequence: Synthetic polynucleotide
ggttctactagcgaatctccttctggtaccgctccaggttctaccagcgaatccccgtctggtactgctccaggttctaccagcgaatctccttctggtactgcacca

SEQ ID NO: 434 - protein, 36 aa, Artificial Sequence; identical to SEQ ID NO: 428
  Description of Artificial Sequence: Synthetic polypeptide

SEQ ID NO: 435 - DNA, 108 bp, Artificial Sequence
  Description of Artificial Sequence: Synthetic polynucleotide
ggttccaccagctctactgctgaatctcctggcccaggttctaccagctctactgctgaatctccgggcccaggttccaccagctctaccgctgaatctccgggtcca

SEQ ID NO: 436 - protein, 36 aa, Artificial Sequence; identical to SEQ ID NO: 410
  Description of Artificial Sequence: Synthetic polypeptide

SEQ ID NO: 437 - DNA, 108 bp, Artificial Sequence
  Description of Artificial Sequence: Synthetic polynucleotide
ggttccactagctctaccgcagaatctcctggtccaggttctactagctctactgctgaatctccgggtccaggtacctcccctagcggcgaatcttctaccgctcca

SEQ ID NO: 438 - protein, 36 aa, Artificial Sequence
  Description of Artificial Sequence: Synthetic polypeptide
GSSPSASTGTGPGSSTPSGATGSPGSSTPSGATGSP

SEQ ID NO: 439 - DNA, 108 bp, Artificial Sequence
  Description of Artificial Sequence: Synthetic polynucleotide
ggttctagcccttctgcttccaccggtaccggcccaggtagctctactccgtctggtgcaactggctctccaggtagctctactccgtctggtgcaaccggctcccca

SEQ ID NO: 440 - protein, 36 aa, Artificial Sequence
  Description of Artificial Sequence: Synthetic polypeptide
GTSPSGESSTAPGTSTPESGSASPGSTSSTAESPGP

SEQ ID NO: 441 - DNA, 108 bp, Artificial Sequence
  Description of Artificial Sequence: Synthetic polynucleotide
ggtacttcccctagcggtgaatcttctactgctccaggtacctctactccggaaagcggctccgcatctccaggttctactagctctactgctgaatctcctggtcca

SEQ ID NO: 442 - protein, 36 aa, Artificial Sequence
  Description of Artificial Sequence: Synthetic polypeptide
GSTSSTAESPGPGSTSSTAESPGPGTSTPESGSASP

SEQ ID NO: 443 - DNA, 108 bp, Artificial Sequence
  Description of Artificial Sequence: Synthetic polynucleotide
ggttctactagctctaccgctgaatctccgggtccaggttctaccagctctactgcagaatctcctggcccaggtacttctactccggaaagcggttccgcttctcca

SEQ ID NO: 444 - protein, 36 aa, Artificial Sequence
  Description of Artificial Sequence: Synthetic polypeptide
GTSPSGESSTAPGSTSSTAESPGPGTSTPESGSASP

SEQ ID NO: 445 - DNA, 108 bp, Artificial Sequence
  Description of Artificial Sequence: Synthetic polynucleotide
ggtacttctcctagcggtgaatcttctaccgctccaggttctaccagctctactgctgaatctcctggcccaggtacttctaccccggaaagcggctccgcttctcca

SEQ ID NO: 446 - protein, 36 aa, Artificial Sequence; identical to SEQ ID NO: 430
  Description of Artificial Sequence: Synthetic polypeptide

SEQ ID NO: 447 - DNA, 108 bp, Artificial Sequence
  Description of Artificial Sequence: Synthetic polynucleotide
ggttctactagcgaatccccttctggtactgcaccaggttctaccagctctactgctgaatctccgggcccaggttccaccagctctaccgcagaatctcctggtcca

SEQ ID NO: 448 - protein, 36 aa, Artificial Sequence; identical to SEQ ID NO: 426
  Description of Artificial Sequence: Synthetic polypeptide

SEQ ID NO: 449 - DNA, 108 bp, Artificial Sequence
  Description of Artificial Sequence: Synthetic polynucleotide
ggttccaccagctctaccgctgaatctccgggcccaggttctaccagcgaatccccttctggcactgcaccaggttctactagctctaccgcagaatctccgggccca

SEQ ID NO: 450 - protein, 36 aa, Artificial Sequence; identical to SEQ ID NO: 408
  Description of Artificial Sequence: Synthetic polypeptide

SEQ ID NO: 451 - DNA, 108 bp, Artificial Sequence
  Description of Artificial Sequence: Synthetic polynucleotide
ggttctaccagctctactgctgaatctccgggtccaggtacttccccgagcggtgaatcttctactgcaccaggtacttctactccggaaagcggttccgcttctcca

SEQ ID NO: 452 - protein, 36 aa, Artificial Sequence
  Description of Artificial Sequence: Synthetic polypeptide
GSTSESPSGTAPGSTSESPSGTAPGTSPSGESSTAP

SEQ ID NO: 453 - DNA, 108 bp, Artificial Sequence
  Description of Artificial Sequence: Synthetic polynucleotide
ggttctaccagcgaatctccttctggcaccgctccaggttctactagcgaatccccgtctggtaccgcaccaggtacttctcctagcggcgaatcttctaccgcacca

SEQ ID NO: 454 - protein, 36 aa, Artificial Sequence
  Description of Artificial Sequence: Synthetic polypeptide
GSTSESPSGTAPGSTSESPSGTAPGTSTPESGSASP

SEQ ID NO: 455 - DNA, 108 bp, Artificial Sequence
  Description of Artificial Sequence: Synthetic polynucleotide
ggttctaccagcgaatccccttctggtactgctccaggttctaccagcgaatccccttctggcaccgcaccaggtacttctacccctgaaagcggctccgcttctcca

SEQ ID NO: 456 - protein, 36 aa, Artificial Sequence
  Description of Artificial Sequence: Synthetic polypeptide
GTSTPESGSASPGSTSSTAESPGPGSTSSTAESPGP

SEQ ID NO: 457 - DNA, 108 bp, Artificial Sequence
  Description of Artificial Sequence: Synthetic polynucleotide
ggtacctctactcctgaaagcggttctgcatctccaggttccactagctctaccgcagaatctccgggcccaggttctactagctctactgctgaatctcctggccca

SEQ ID NO: 458 - protein, 36 aa, Artificial Sequence; identical to SEQ ID NO: 452
  Description of Artificial Sequence: Synthetic polypeptide

SEQ ID NO: 459 - DNA, 108 bp, Artificial Sequence
  Description of Artificial Sequence: Synthetic polynucleotide
ggttctaccagcgaatccccttctggcactgcaccaggttctactagcgaatccccttctggtaccgcaccaggtacttctccgagcggcgaatcttctactgctcca

SEQ ID NO: 460 - protein, 36 aa, Artificial Sequence
  Description of Artificial Sequence: Synthetic polypeptide
GSTSSTAESPGPGSTSSTAESPGPGSTSESPSGTAP

SEQ ID NO: 461 - DNA, 108 bp, Artificial Sequence
  Description of Artificial Sequence: Synthetic polynucleotide
ggttctactagctctaccgctgaatctcctggcccaggttccactagctctaccgcagaatctccgggcccaggttctactagcgaatccccttctggtaccgctcca

SEQ ID NO: 462 - protein, 36 aa, Artificial Sequence; identical to SEQ ID NO: 442
  Description of Artificial Sequence: Synthetic polypeptide

SEQ ID NO: 463 - DNA, 108 bp, Artificial Sequence
  Description of Artificial Sequence: Synthetic polynucleotide
ggttccaccagctctactgcagaatctcctggcccaggttctactagctctaccgcagaatctcctggtccaggtacctctactcctgaaagcggttccgcatctcca

SEQ ID NO: 464 - protein, 36 aa, Artificial Sequence; identical to SEQ ID NO: 460
  Description of Artificial Sequence: Synthetic polypeptide

SEQ ID NO: 465 - DNA, 108 bp, Artificial Sequence
  Description of Artificial Sequence: Synthetic polynucleotide
ggttctactagctctactgctgaatctccgggcccaggttctactagctctaccgctgaatctccgggtccaggttctactagcgaatctccttctggtaccgctcca

SEQ ID NO: 466 - protein, 36 aa, Artificial Sequence
  Description of Artificial Sequence: Synthetic polypeptide
GTSPSGESSTAPGSTSESPSGTAPGSTSSTAESPGP

SEQ ID NO: 467 - DNA, 108 bp, Artificial Sequence
  Description of Artificial Sequence: Synthetic polynucleotide
ggtacctccccgagcggtgaatcttctactgcaccaggttctactagcgaatccccttctggtactgctccaggttccaccagctctactgcagaatctccgggtcca

SEQ ID NO: 468 - protein, 36 aa, Artificial Sequence
  Description of Artificial Sequence: Synthetic polypeptide
GSTSESPSGTAPGTSPSGESSTAPGSTSSTAESPGP

SEQ ID NO: 469 - DNA, 108 bp, Artificial Sequence
  Description of Artificial Sequence: Synthetic polynucleotide
ggttctactagcgaatccccgtctggtactgctccaggtacttcccctagcggtgaatcttctactgctccaggttctaccagctctaccgcagaatctccgggtcca

SEQ ID NO: 470 - protein, 36 aa, Artificial Sequence
  Description of Artificial Sequence: Synthetic polypeptide
GSTSSTAESPGPGSTSESPSGTAPGTSPSGESSTAP

SEQ ID NO: 471 - DNA, 108 bp, Artificial Sequence
  Description of Artificial Sequence: Synthetic polynucleotide
ggttctaccagctctaccgctgaatctcctggcccaggttctactagcgaatctccgtctggcaccgcaccaggtacttcccctagcggtgaatcttctactgcacca

SEQ ID NO: 472 - protein, 36 aa, Artificial Sequence; identical to SEQ ID NO: 454
  Description of Artificial Sequence: Synthetic polypeptide

SEQ ID NO: 473 - DNA, 108 bp, Artificial Sequence
  Description of Artificial Sequence: Synthetic polynucleotide
ggttctactagcgaatctccttctggcactgcaccaggttctaccagcgaatctccgtctggcactgcaccaggtacctctacccctgaaagcggttccgcttctcca

SEQ ID NO: 474 - protein, 36 aa, Artificial Sequence
  Description of Artificial Sequence: Synthetic polypeptide
GTSTPESGSASPGSTSESPSGTAPGSTSSTAESPGP

SEQ ID NO: 475 - DNA, 108 bp, Artificial Sequence
  Description of Artificial Sequence: Synthetic polynucleotide
ggtacctctactccggaaagcggttccgcatctccaggttctaccagcgaatccccgtctggcaccgcaccaggttctactagctctactgctgaatctccgggccca

SEQ ID NO: 476 - protein, 36 aa, Artificial Sequence
  Description of Artificial Sequence: Synthetic polypeptide
GSTSSTAESPGPGTSPSGESSTAPGTSPSGESSTAP

SEQ ID NO: 477 - DNA, 108 bp, Artificial Sequence
  Description of Artificial Sequence: Synthetic polynucleotide
ggttctactagctctactgcagaatctccgggcccaggtacctctcctagcggtgaatcttctaccgctccaggtacttctccgagcggtgaatcttctaccgctcca

SEQ ID NO: 478 - protein, 36 aa, Artificial Sequence
  Description of Artificial Sequence: Synthetic polypeptide
GTSPSGESSTAPGTSPSGESSTAPGTSPSGESSTAP

SEQ ID NO: 479 - DNA, 108 bp, Artificial Sequence
  Description of Artificial Sequence: Synthetic polynucleotide
ggtacctcccctagcggcgaatcttctactgctccaggtacctctcctagcggcgaatcttctaccgctccaggtacctcccctagcggtgaatcttctaccgcacca

SEQ ID NO: 480 - protein, 36 aa, Artificial Sequence; identical to SEQ ID NO: 414
  Description of Artificial Sequence: Synthetic polypeptide

SEQ ID NO: 481 - DNA, 108 bp, Artificial Sequence
  Description of Artificial Sequence: Synthetic polynucleotide
ggttccactagctctactgctgaatctcctggcccaggtacttctactccggaaagcggttccgcttctccaggttctactagcgaatctccgtctggcaccgcacca

SEQ ID NO: 482 - protein, 36 aa, Artificial Sequence
  Description of Artificial Sequence: Synthetic polypeptide
GSTSESPSGTAPGTSPSGESSTAPGTSPSGESSTAP

SEQ ID NO: 483 - DNA, 108 bp, Artificial Sequence
  Description of Artificial Sequence: Synthetic polynucleotide
ggttctactagcgaatctccgtctggcactgctccaggtacttctcctagcggtgaatcttctaccgctccaggtacttcccctagcggcgaatcttctaccgctcca

SEQ ID NO: 484 - protein, 36 aa, Artificial Sequence
  Description of Artificial Sequence: Synthetic polypeptide
GSTSESPSGTAPGTSTPESGSASPGSTSSTAESPGP

SEQ ID NO: 485 - DNA, 108 bp, Artificial Sequence
  Description of Artificial Sequence: Synthetic polynucleotide
ggttctactagcgaatctccttctggtaccgctccaggtacttctacccctgaaagcggctccgcttctccaggttccactagctctaccgctgaatctccgggtcca

SEQ ID NO: 486 - protein, 36 aa, Artificial Sequence; identical to SEQ ID NO: 460
  Description of Artificial Sequence: Synthetic polypeptide

SEQ ID NO: 487 - DNA, 108 bp, Artificial Sequence
  Description of Artificial Sequence: Synthetic polynucleotide
ggttccactagctctactgctgaatctcctggcccaggttctaccagctctaccgctgaatctcctggcccaggttctaccagcgaatctccgtctggcaccgcacca

SEQ ID NO: 488 - protein, 36 aa, Artificial Sequence
  Description of Artificial Sequence: Synthetic polypeptide
GSTSESPSGTAPGTSTPESGSASPGTSTPESGSASP

SEQ ID NO: 489 - DNA, 108 bp, Artificial Sequence
  Description of Artificial Sequence: Synthetic polynucleotide
ggttctactagcgaatccccgtctggtaccgcaccaggtacttctaccccggaaagcggctctgcttctccaggtacttctaccccggaaagcggctccgcatctcca

SEQ ID NO: 490 - protein, 36 aa, Artificial Sequence; identical to SEQ ID NO: 488
  Description of Artificial Sequence: Synthetic polypeptide

SEQ ID NO: 491 - DNA, 108 bp, Artificial Sequence
  Description of Artificial Sequence: Synthetic polynucleotide
ggttctactagcgaatccccgtctggtactgctccaggtacttctactcctgaaagcggttccgcttctccaggtacctctactccggaaagcggttctgcatctcca

SEQ ID NO: 492 - protein, 12 aa, Artificial Sequence
  Description of Artificial Sequence: Synthetic peptide
GTPGSGTASSSP

SEQ ID NO: 493 - protein, 12 aa, Artificial Sequence
  Description of Artificial Sequence: Synthetic peptide
GSSTPSGATGSP

SEQ ID NO: 494 - protein, 12 aa, Artificial Sequence
  Description of Artificial Sequence: Synthetic peptide
GSSPSASTGTGP

SEQ ID NO: 495 - protein, 12 aa, Artificial Sequence
  Description of Artificial Sequence: Synthetic peptide
GASPGTSSTGSP

SEQ ID NO: 496 - DNA, 36 bp, Artificial Sequence
  Description of Artificial Sequence: Synthetic oligonucleotide
aggtacycckggyagcggtacygcwtcttcytctcc

SEQ ID NO: 497 - DNA, 36 bp, Artificial Sequence
  Description of Artificial Sequence: Synthetic oligonucleotide
acctggagargaagawgcrgtaccgctrccmggrgt

SEQ ID NO: 498 - DNA, 36 bp, Artificial Sequence
  Description of Artificial Sequence: Synthetic oligonucleotide
aggtagctctacyccktctggtgcwacyggytcycc

SEQ ID NO: 499 - DNA, 36 bp, Artificial Sequence
  Description of Artificial Sequence: Synthetic oligonucleotide
acctggrgarccrgtwgcaccagamggrgtagagct

SEQ ID NO: 500 - DNA, 36 bp, Artificial Sequence
  Description of Artificial Sequence: Synthetic oligonucleotide
aggttctagcccktctgcwtcyacyggtacyggycc

SEQ ID NO: 501 - DNA, 36 bp, Artificial Sequence
  Description of Artificial Sequence: Synthetic oligonucleotide
acctggrccrgtaccrgtrgawgcagamgggctaga

SEQ ID NO: 502 - DNA, 36 bp, Artificial Sequence
  Description of Artificial Sequence: Synthetic oligonucleotide
aggtgcwtcycckggyacyagctctacyggttctcc

SEQ ID NO: 503 - DNA, 36 bp, Artificial Sequence
  Description of Artificial Sequence: Synthetic oligonucleotide
acctggagaaccrgtagagctrgtrccmggrgawgc

SEQ ID NO: 504 - DNA, 24 bp, Artificial Sequence
  Description of Artificial Sequence: Synthetic oligonucleotide
aggttcgtcttcactcgagggtac

SEQ ID NO: 505 - DNA, 16 bp, Artificial Sequence
  Description of Artificial Sequence: Synthetic oligonucleotide
cctcgagtgaagacga

SEQ ID NO: 506 - protein, 36 aa, Artificial Sequence
  Description of Artificial Sequence: Synthetic polypeptide
GASPGTSSTGSPGTPGSGTASSSPGSSTPSGATGSP

SEQ ID NO: 507 - DNA, 108 bp, Artificial Sequence
  Description of Artificial Sequence: Synthetic polynucleotide
ggtgcatccccgggcactagctctaccggttctccaggtactcctggtagcggtactgcttcttcttctccaggtagctctactccttctggtgctactggttctcca

SEQ ID NO: 508 - protein, 36 aa, Artificial Sequence
  Description of Artificial Sequence: Synthetic polypeptide
GSSTPSGATGSPGSSPSASTGTGPGSSTPSGATGSP

SEQ ID NO: 509 - DNA, 108 bp, Artificial Sequence
  Description of Artificial Sequence: Synthetic polynucleotide
ggtagctctaccccttctggtgctaccggctctccaggttctagcccgtctgcttctaccggtaccggtccaggtagctctaccccttctggtgctactggttctcca

SEQ ID NO: 510 - protein, 36 aa, Artificial Sequence
  Description of Artificial Sequence: Synthetic polypeptide
GASPGTSSTGSPGSSPSASTGTGPGSSTPSGATGSP

SEQ ID NO: 511 - DNA, 108 bp, Artificial Sequence
  Description of Artificial Sequence: Synthetic polynucleotide
ggtgcatctccgggtactagctctaccggttctccaggttctagcccttctgcttccactggtaccggcccaggtagctctaccccgtctggtgctactggttcccca

SEQ ID NO: 512 - protein, 36 aa, Artificial Sequence
  Description of Artificial Sequence: Synthetic polypeptide
GTPGSGTASSSPGSSTPSGATGSPGASPGTSSTGSP

SEQ ID NO: 513 - DNA, 108 bp, Artificial Sequence
  Description of Artificial Sequence: Synthetic polynucleotide
ggtactccgggcagcggtactgcttcttcctctccaggtagctctaccccttctggtgcaactggttccccaggtgcatcccctggtactagctctaccggttctcca

SEQ ID NO: 514 - protein, 36 aa, Artificial Sequence
  Description of Artificial Sequence: Synthetic polypeptide
GTPGSGTASSSPGASPGTSSTGSPGSRPSASTGTGP

SEQ ID NO: 515 - DNA, 108 bp, Artificial Sequence
  Description of Artificial Sequence: Synthetic polynucleotide
ggtacccctggcagcggtactgcttcttcttctccaggtgcttcccctggtaccagctctaccggttctccaggttctagaccttctgcatccaccggtactggtcca

SEQ ID NO: 516 - protein, 36 aa, Artificial Sequence
  Description of Artificial Sequence: Synthetic polypeptide
GASPGTSSTGSPGSSTPSGATGSPGASPGTSSTGSP

SEQ ID NO: 517 - DNA, 108 bp, Artificial Sequence
  Description of Artificial Sequence: Synthetic polynucleotide
ggtgcatctcctggtaccagctctaccggttctccaggtagctctactccttctggtgctactggctctccaggtgcttccccgggtaccagctctaccggttctcca

SEQ ID NO: 518 - protein, 36 aa, Artificial Sequence
  Description of Artificial Sequence: Synthetic polypeptide
GTPGSGTASSSPGSSTPSGATGSPGSSTPSGATGSP

SEQ ID NO: 519 - DNA, 108 bp, Artificial Sequence
  Description of Artificial Sequence: Synthetic polynucleotide
ggtaccccgggcagcggtaccgcatcttcctctccaggtagctctaccccgtctggtgctaccggttccccaggtagctctaccccgtctggtgcaaccggctcccca

SEQ ID NO: 520 - protein, 36 aa, Artificial Sequence
  Description of Artificial Sequence: Synthetic polypeptide
GASPGTSSTGSPGASPGTSSTGSPGASPGTSSTGSP

SEQ ID NO: 521 - DNA, 108 bp, Artificial Sequence
  Description of Artificial Sequence: Synthetic polynucleotide
ggtgcatctccgggcactagctctactggttctccaggtgcatcccctggcactagctctactggttctccaggtgcttctcctggtaccagctctactggttctcca

SEQ ID NO: 522 - protein, 36 aa, Artificial Sequence
  Description of Artificial Sequence: Synthetic polypeptide
GSSTPSGATGSPGSSPSASTGTGPGASPGTSSTGSP

SEQ ID NO: 523 - DNA, 108 bp, Artificial Sequence
  Description of Artificial Sequence: Synthetic polynucleotide
ggtagctctactccgtctggtgcaaccggctccccaggttctagcccgtctgcttccactggtactggcccaggtgcttccccgggcaccagctctactggttctcca

SEQ ID NO: 524 - protein, 36 aa, Artificial Sequence
  Description of Artificial Sequence: Synthetic polypeptide
GSSTPSGATGSPGSSTPSGATGSPGTPGSGTASSSP

SEQ ID NO: 525 - DNA, 108 bp, Artificial Sequence
  Description of Artificial Sequence: Synthetic polynucleotide
ggtagctctactccttctggtgctaccggttccccaggtagctctactccttctggtgctactggttccccaggtactccgggcagcggtactgcttcttcctctcca

SEQ ID NO: 526 - protein, 36 aa, Artificial Sequence
  Description of Artificial Sequence: Synthetic polypeptide
GSSTPSGATGSPGSSTPSGATGSPGASPGTSSTGSP

SEQ ID NO: 527 - DNA, 108 bp, Artificial Sequence
  Description of Artificial Sequence: Synthetic polynucleotide
ggtagctctactccgtctggtgcaaccggttccccaggtagctctactccttctggtgctactggctccccaggtgcatcccctggcaccagctctaccggttctcca

SEQ ID NO: 528 - protein, 36 aa, Artificial Sequence
  Description of Artificial Sequence: Synthetic polypeptide
GTPGSGTASSSPGSSPSASTGTGPGSSTPSGATGSP

SEQ ID NO: 529 - DNA, 108 bp, Artificial Sequence
  Description of Artificial Sequence: Synthetic polynucleotide
ggtactcctggtagcggtaccgcatcttcctctccaggttctagcccttctgcatctaccggtaccggtccaggtagctctactccttctggtgctactggctctcca

SEQ ID NO: 530 - protein, 36 aa, Artificial Sequence
  Description of Artificial Sequence: Synthetic polypeptide
GASPGTSSTGSPGSSPSASTGTGPGTPGSGTASSSP

SEQ ID NO: 531 - DNA, 108 bp, Artificial Sequence
  Description of Artificial Sequence: Synthetic polynucleotide
ggtgcttccccgggcactagctctaccggttctccaggttctagcccttctgcatctactggtactggcccaggtactccgggcagcggtactgcttcttcctctcca

SEQ ID NO: 532 - protein, 36 aa, Artificial Sequence; identical to SEQ ID NO: 526
  Description of Artificial Sequence: Synthetic polypeptide

SEQ ID NO: 533 - DNA, 108 bp, Artificial Sequence
  Description of Artificial Sequence: Synthetic polynucleotide
ggtagctctactccgtctggtgctaccggctctccaggtagctctaccccttctggtgcaaccggctccccaggtgcttctccgggtaccagctctactggttctcca

SEQ ID NO: 534 - protein, 36 aa, Artificial Sequence
  Description of Artificial Sequence: Synthetic polypeptide
GTPGSGTASSSPGSSTPSGATGSPGSSPSASTGTGP

SEQ ID NO: 535 - DNA, 108 bp, Artificial Sequence
  Description of Artificial Sequence: Synthetic polynucleotide
ggtacccctggcagcggtaccgcttcttcctctccaggtagctctaccccgtctggtgctactggctctccaggttctagcccgtctgcatctaccggtaccggccca

SEQ ID NO: 536 - protein, 36 aa, Artificial Sequence
  Description of Artificial Sequence: Synthetic polypeptide
GSSTPSGATGSPGTPGSGTASSSPGTPGSGTASSSP

SEQ ID NO: 537 - DNA, 108 bp, Artificial Sequence
  Description of Artificial Sequence: Synthetic polynucleotide
ggtagctctactccttctggtgcaaccggctccccaggtaccccgggcagcggtaccgcatcttcctctccaggtactccgggtagcggtactgcttcttcttctcca

SEQ ID NO: 538 - protein, 36 aa, Artificial Sequence; identical to SEQ ID NO: 512
  Description of Artificial Sequence: Synthetic polypeptide

SEQ ID NO: 539 - DNA, 108 bp, Artificial Sequence
  Description of Artificial Sequence: Synthetic polynucleotide
ggtaccccgggtagcggtactgcttcttcctctccaggtagctctaccccttctggtgcaaccggctctccaggtgcttctccgggcaccagctctaccggttctcca

SEQ ID NO: 540 - protein, 36 aa, Artificial Sequence; identical to SEQ ID NO: 526
  Description of Artificial Sequence: Synthetic polypeptide

SEQ ID NO: 541 - DNA, 108 bp, Artificial Sequence
  Description of Artificial Sequence: Synthetic polynucleotide
ggtagctctaccccgtctggtgctaccggctctccaggtagctctaccccgtctggtgcaaccggctccccaggtgcatccccgggtactagctctaccggttctcca

SEQ ID NO: 542 - protein, 36 aa, Artificial Sequence; identical to SEQ ID NO: 506
  Description of Artificial Sequence: Synthetic polypeptide

SEQ ID NO: 543 - DNA, 108 bp, Artificial Sequence
  Description of Artificial Sequence: Synthetic polynucleotide
ggtgcttctccgggcaccagctctactggttctccaggtaccccgggcagcggtaccgcatcttcttctccaggtagctctactccttctggtgcaactggttctcca

SEQ ID NO: 544 - protein, 36 aa, Artificial Sequence
  Description of Artificial Sequence: Synthetic polypeptide
GSSPSASTGTGPGSSTPSGATGSPGTPGSGTASSSP

SEQ ID NO: 545 - DNA, 108 bp, Artificial Sequence
  Description of Artificial Sequence: Synthetic polynucleotide
ggttctagcccgtctgcttccaccggtactggcccaggtagctctaccccgtctggtgcaactggttccccaggtacccctggtagcggtaccgcttcttcttctcca

SEQ ID NO: 546 - protein, 36 aa, Artificial Sequence; identical to SEQ ID NO: 510
  Description of Artificial Sequence: Synthetic polypeptide

SEQ ID NO: 547 - DNA, 108 bp, Artificial Sequence
  Description of Artificial Sequence: Synthetic polynucleotide
ggtgcttctccgggcaccagctctactggttctccaggttctagcccttctgcatccaccggtaccggtccaggtagctctaccccttctggtgcaaccggctctcca

SEQ ID NO: 548 - protein, 36 aa, Artificial Sequence
  Description of Artificial Sequence: Synthetic polypeptide
GASPGTSSTGSPGSSTPSGATGSPGSSTPSGATGSP

SEQ ID NO: 549 - DNA, 108 bp, Artificial Sequence
  Description of Artificial Sequence: Synthetic polynucleotide
ggtgcatccccgggcaccagctctaccggttctccaggtagctctaccccgtctggtgctaccggctctccaggtagctctaccccgtctggtgctactggctctcca

SEQ ID NO: 550 - protein, 36 aa, Artificial Sequence
  Description of Artificial Sequence: Synthetic polypeptide
GTPGSGTASSSPGSSTPSGATGSPGTPGSGTASSSP

SEQ ID NO: 551 - DNA, 108 bp, Artificial Sequence
  Description of Artificial Sequence: Synthetic polynucleotide
ggtacccctggtagcggtactgcttcttcctctccaggtagctctactccgtctggtgctaccggttctccaggtaccccgggtagcggtaccgcatcttcttctcca

SEQ ID NO: 552 - protein, 36 aa, Artificial Sequence; identical to SEQ ID NO: 438
  Description of Artificial Sequence: Synthetic polypeptide

SEQ ID NO: 553 - DNA, 108 bp, Artificial Sequence
  Description of Artificial Sequence: Synthetic polynucleotide
ggttctagcccttctgcttccaccggtactggcccaggtagctctaccccttctggtgctaccggctccccaggtagctctactccttctggtgcaactggctctcca

SEQ ID NO: 554 - protein, 36 aa, Artificial Sequence
  Description of Artificial Sequence: Synthetic polypeptide
GASPGTSSTGSPGSSPSASTGTGPGSSPSASTGTGP

SEQ ID NO: 555 - DNA, 108 bp, Artificial Sequence
  Description of Artificial Sequence: Synthetic polynucleotide
ggtgcttctcctggcaccagctctactggttctccaggttctagcccttctgcttctaccggtactggtccaggttctagcccttctgcatccactggtactggtcca

SEQ ID NO: 556 - protein, 36 aa, Artificial Sequence
  Description of Artificial Sequence: Synthetic polypeptide
GTPGSGTASSSPGASPGTSSTGSPGASPGTSSTGSP

SEQ ID NO: 557 - DNA, 108 bp, Artificial Sequence
  Description of Artificial Sequence: Synthetic polynucleotide
ggtactcctggcagcggtaccgcttcttcttctccaggtgcttctcctggtactagctctactggttctccaggtgcttctccgggcactagctctactggttctcca

SEQ ID NO: 558 - protein, 36 aa, Artificial Sequence
  Description of Artificial Sequence: Synthetic polypeptide
GSSTPSGATGSPGASPGTSSTGSPGSSTPSGATGSP

SEQ ID NO: 559 - DNA, 108 bp, Artificial Sequence
  Description of Artificial Sequence: Synthetic polynucleotide
ggtagctctaccccgtctggtgctaccggttccccaggtgcttctcctggtactagctctaccggttctccaggtagctctaccccgtctggtgctactggctctcca

SEQ ID NO: 560 - protein, 36 aa, Artificial Sequence
  Description of Artificial Sequence: Synthetic polypeptide
GSSTPSGATGSPGTPGSGTASSSPGSSTPSGATGSP

SEQ ID NO: 561 - DNA, 108 bp, Artificial Sequence
  Description of Artificial Sequence: Synthetic polynucleotide
ggtagctctaccccgtctggtgctactggttctccaggtactccgggcagcggtactgcttcttcctctccaggtagctctaccccttctggtgctactggctctcca

SEQ ID NO: 562 - protein, 36 aa, Artificial Sequence; identical to SEQ ID NO: 510
  Description of Artificial Sequence: Synthetic polypeptide

SEQ ID NO: 563 - DNA, 108 bp, Artificial Sequence
  Description of Artificial Sequence: Synthetic polynucleotide
ggtgcatctcctggtaccagctctactggttctccaggttctagcccttctgcttctaccggtaccggtccaggtagctctactccttctggtgctaccggttctcca

SEQ ID NO: 564 - protein, 36 aa, Artificial Sequence
  Description of Artificial Sequence: Synthetic polypeptide
GSSTPSGATGSPGSSTPSGATGSPGSSTPSGATGSP

SEQ ID NO: 565 - DNA, 108 bp, Artificial Sequence
  Description of Artificial Sequence: Synthetic polynucleotide
ggtagctctaccccgtctggtgctactggctctccaggtagctctactccttctggtgctactggttccccaggtagctctaccccgtctggtgcaactggctctcca

SEQ ID NO: 566 - protein, 36 aa, Artificial Sequence
  Description of Artificial Sequence: Synthetic polypeptide
GASPGTSSTGSPGTPGSGTASSSPGASPGTSSTGSP

SEQ ID NO: 567 - DNA, 108 bp, Artificial Sequence
  Description of Artificial Sequence: Synthetic polynucleotide
ggtgcatccccgggtaccagctctaccggttctccaggtactcctggcagcggtactgcatcttcctctccaggtgcttctccgggcaccagctctactggttctcca

SEQ ID NO: 568 - protein, 36 aa, Artificial Sequence; identical to SEQ ID NO: 522
  Description of Artificial Sequence: Synthetic polypeptide

SEQ ID NO: 569 - DNA, 108 bp, Artificial Sequence
  Description of Artificial Sequence: Synthetic polynucleotide
ggtagctctactccttctggtgcaactggttctccaggttctagcccgtctgcatccactggtaccggtccaggtgcttcccctggcaccagctctaccggttctcca

SEQ ID NO: 570 - protein, 36 aa, Artificial Sequence
  Description of Artificial Sequence: Synthetic polypeptide
GASPGTSSTGSPGSSTPSGATGSPGSSPSASTGTGP

SEQ ID NO: 571 - DNA, 108 bp, Artificial Sequence
  Description of Artificial Sequence: Synthetic polynucleotide
ggtgcatctcctggtactagctctactggttctccaggtagctctactccgtctggtgcaaccggctctccaggttctagcccttctgcatctaccggtactggtcca

SEQ ID NO: 572 - protein, 36 aa, Artificial Sequence; identical to SEQ ID NO: 512
  Description of Artificial Sequence: Synthetic polypeptide

SEQ ID NO: 573 - DNA, 108 bp, Artificial Sequence
  Description of Artificial Sequence: Synthetic polynucleotide
ggtactcctggcagcggtaccgcatcttcctctccaggtagctctactccgtctggtgcaactggttccccaggtgcttctccgggtaccagctctaccggttctcca

SEQ ID NO: 574 - protein, 36 aa, Artificial Sequence; identical to SEQ ID NO: 560
  Description of Artificial Sequence: Synthetic polypeptide

SEQ ID NO: 575 - DNA, 108 bp, Artificial Sequence
  Description of Artificial Sequence: Synthetic polynucleotide
ggtagctctaccccgtctggtgcaaccggctccccaggtactcctggtagcggtaccgcttcttcttctccaggtagctctactccgtctggtgctaccggctcccca

SEQ ID NO: 576 - protein, 36 aa, Artificial Sequence
  Description of Artificial Sequence: Synthetic polypeptide
GSSPSASTGTGPGSSPSASTGTGPGASPGTSSTGSP

SEQ ID NO: 577 - DNA, 108 bp, Artificial Sequence
  Description of Artificial Sequence: Synthetic polynucleotide
ggttctagcccttctgcatccaccggtaccggcccaggttctagcccgtctgcttctaccggtactggtccaggtgcttctccgggtactagctctactggttctcca

SEQ ID NO: 578 - protein, 36 aa, Artificial Sequence
  Description of Artificial Sequence: Synthetic polypeptide
GTPGSGTASSSPGSSTPSGATGSPGSNPSASTGTGP

SEQ ID NO: 579 - DNA, 108 bp, Artificial Sequence
  Description of Artificial Sequence: Synthetic polynucleotide
ggtaccccgggtagcggtaccgcttcttcttctccaggtagctctactccgtctggtgctaccggctctccaggttctaacccttctgcatccaccggtaccggccca

SEQ ID NO: 580 - protein, 36 aa, Artificial Sequence
  Description of Artificial Sequence: Synthetic polypeptide
GSSPSASTGTGPGSSTPSGATGSPGASPGTSSTGSP

SEQ ID NO: 581 - DNA, 108 bp, Artificial Sequence
  Description of Artificial Sequence: Synthetic polynucleotide
ggttctagcccttctgcatctactggtactggcccaggtagctctactccttctggtgctaccggctctccaggtgcttctccgggtactagctctaccggttctcca

SEQ ID NO: 582 - protein, 36 aa, Artificial Sequence
  Description of Artificial Sequence: Synthetic polypeptide
GSSTPSGATGSPGASPGTSSTGSPGTPGSGTASSSP

SEQ ID NO: 583 - DNA, 108 bp, Artificial Sequence
  Description of Artificial Sequence: Synthetic polynucleotide
ggtagctctaccccttctggtgcaaccggctctccaggtgcatccccgggtaccagctctaccggttctccaggtactccgggtagcggtaccgcttcttcctctcca

SEQ ID NO: 584 - protein, 36 aa, Artificial Sequence; identical to SEQ ID NO: 564
  Description of Artificial Sequence: Synthetic polypeptide

SEQ ID NO: 585 - DNA, 108 bp, Artificial Sequence
  Description of Artificial Sequence: Synthetic polynucleotide
ggtagctctactccgtctggtgcaaccggttccccaggtagctctaccccttctggtgcaaccggctccccaggtagctctaccccttctggtgcaactggctctcca

SEQ ID NO: 586 - protein, 36 aa, Artificial Sequence; identical to SEQ ID NO: 506
  Description of Artificial Sequence: Synthetic polypeptide

SEQ ID NO: 587 - DNA, 108 bp, Artificial Sequence
  Description of Artificial Sequence: Synthetic polynucleotide
ggtgcttctcctggcactagctctaccggttctccaggtacccctggtagcggtaccgcatcttcctctccaggtagctctactccttctggtgctactggttcccca

SEQ ID NO: 588 - protein, 36 aa, Artificial Sequence
  Description of Artificial Sequence: Synthetic polypeptide
GSSTPSGATGSPGSSPSASTGTGPGSSPSASTGTGP

SEQ ID NO: 589 - DNA, 108 bp, Artificial Sequence
  Description of Artificial Sequence: Synthetic polynucleotide
ggtagctctaccccgtctggtgctactggctccccaggttctagcccttctgcatccaccggtaccggtccaggttctagcccgtctgcatctactggtactggtcca

SEQ ID NO: 590 - protein, 36 aa, Artificial Sequence; identical to SEQ ID NO: 554
  Description of Artificial Sequence: Synthetic polypeptide

SEQ ID NO: 591 - DNA, 108 bp, Artificial Sequence
  Description of Artificial Sequence: Synthetic polynucleotide
ggtgcttccccgggcaccagctctactggttctccaggttctagcccgtctgcttctactggtactggtccaggttctagcccttctgcttccactggtactggtcca

SEQ ID NO: 592 - protein, 36 aa, Artificial Sequence; identical to SEQ ID NO: 530
  Description of Artificial Sequence: Synthetic polypeptide

SEQ ID NO: 593 - DNA, 108 bp, Artificial Sequence
  Description of Artificial Sequence: Synthetic polynucleotide
ggtgcttccccgggtaccagctctaccggttctccaggttctagcccttctgcttctaccggtaccggtccaggtacccctggcagcggtaccgcatcttcctctcca

SEQ ID NO: 594 - DNA, 432 bp, Artificial Sequence
  Description of Artificial Sequence: Synthetic polynucleotide
ggtaccccgggcagcggtaccgcatcttcctctccaggtagctctaccccgtctggtgctaccggttccccaggtagctctaccccgtctggtgcaaccggctccccaggtagcccggctggctctcctacctctactgaggaaggtacttctgaaagcgctactcctgagtctggtccaggtacctctactgaaccgtccgaaggtagcgctccaggttctagcccttctgcatccaccggtaccggcccaggttctagcccgtctgcttctaccggtactggtccaggtgcttctccgggtactagctctactggttctccaggtacctctaccgaaccgtccgagggtagcgcaccaggtacctctactgaaccgtctgagggtagcgctccaggtagcgaaccggcaacctccggttctgaaactcca

SEQ ID NO: 595 - protein, 144 aa, Artificial Sequence
  Description of Artificial Sequence: Synthetic polypeptide
GTPGSGTASSSPGSSTPSGATGSPGSSTPSGATGSPGSPAGSPTSTEEGTSESATPESGPGTSTEPSEGSAPGSSPSASTGTGPGSSPSASTGTGPGASPGTSSTGSPGTSTEPSEGSAPGTSTEPSEGSAPGSEPATSGSETP

SEQ ID NO: 596 - DNA, 432 bp, Artificial Sequence
  Description of Artificial Sequence: Synthetic polynucleotide
ggttctaccagcgaatccccttctggcactgcaccaggttctactagcgaatccccttctggtaccgcaccaggtacttctccgagcggcgaatcttctactgctccaggtacctctactgaaccttccgaaggcagcgctccaggtacctctaccgaaccgtccgagggcagcgcaccaggtacttctgaaagcgcaacccctgaatccggtccaggtgcatctcctggtaccagctctaccggttctccaggtagctctactccttctggtgctactggctctccaggtgcttccccgggtaccagctctaccggttctccaggttctactagcgaatctccttctggcactgcaccaggttctaccagcgaatctccgtctggcactgcaccaggtacctctacccctgaaagcggttccgcttctcca

SEQ ID NO: 597 - protein, 144 aa, Artificial Sequence
  Description of Artificial Sequence: Synthetic polypeptide
GSTSESPSGTAPGSTSESPSGTAPGTSPSGESSTAPGTSTEPSEGSAPGTSTEPSEGSAPGTSESATPESGPGASPGTSSTGSPGSSTPSGATGSPGASPGTSSTGSPGSTSESPSGTAPGSTSESPSGTAPGTSTPESGSASP

SEQ ID NO: 598 - DNA, 432 bp, Artificial Sequence
  Description of Artificial Sequence: Synthetic polynucleotide
ggtacttctaccgaaccttccgagggcagcgcaccaggtacttctgaaagcgctacccctgagtccggcccaggtacttctgaaagcgctactcctgaatccggtccaggtacctctactgaaccttctgagggcagcgctccaggtacttctgaaagcgctaccccggagtccggtccaggtacttctactgaaccgtccgaaggtagcgcaccaggtacttctactgaaccttccgaaggtagcgctccaggtagcgaacctgctacttctggttctgaaaccccaggtagcccggctggctctccgacctccaccgaggaaggtgcttctcctggcaccagctctactggttctccaggttctagcccttctgcttctaccggtactggtccaggttctagcccttctgcatccactggtactggtcca

SEQ ID NO: 599 - protein, 144 aa, Artificial Sequence
  Description of Artificial Sequence: Synthetic polypeptide
GTSTEPSEGSAPGTSESATPESGPGTSESATPESGPGTSTEPSEGSAPGTSESATPESGPGTSTEPSEGSAPGTSTEPSEGSAPGSEPATSGSETPGSPAGSPTSTEEGASPGTSSTGSPGSSPSASTGTGPGSSPSASTGTGP

SEQ ID NO: 600 - DNA, 432 bp, Artificial Sequence
  Description of Artificial Sequence: Synthetic polynucleotide
ggtagcgaaccggcaacctctggctctgaaaccccaggtacctctgaaagcgctactccggaatctggtccaggtacttctgaaagcgctactccggaatccggtccaggttctaccagcgaatctccttctggcaccgctccaggttctactagcgaatccccgtctggtaccgcaccaggtacttctcctagcggcgaatcttctaccgcaccaggtgcatctccgggtactagctctaccggttctccaggttctagcccttctgcttccactggtaccggcccaggtagctctaccccgtctggtgctactggttccccaggtagctctactccgtctggtgcaaccggttccccaggtagctctactccttctggtgctactggctccccaggtgcatcccctggcaccagctctaccggttctcca

SEQ ID NO: 601 - protein, 144 aa, Artificial Sequence
  Description of Artificial Sequence: Synthetic polypeptide
GSEPATSGSETPGTSESATPESGPGTSESATPESGPGSTSESPSGTAPGSTSESPSGTAPGTSPSGESSTAPGASPGTSSTGSPGSSPSASTGTGPGSSTPSGATGSPGSSTPSGATGSPGSSTPSGATGSPGASPGTSSTGSP

SEQ ID NO: 602 - DNA, 432 bp, Artificial Sequence
  Description of Artificial Sequence: Synthetic polynucleotide
ggtgcttctccgggcaccagctctactggttctccaggttctagcccttctgcatccaccggtaccggtccaggtagctctaccccttctggtgcaaccggctctccaggtacttctgaaagcgctaccccggaatctggcccaggtagcgaaccggctacttctggttctgaaaccccaggtagcgaaccggctacctccggttctgaaactccaggtacttctgaaagcgctactccggagtccggtccaggtacctctaccgaaccgtccgaaggcagcgctccaggtacttctactgaaccttctgagggtagcgctccaggtacctctaccgaaccgtccgagggtagcgcaccaggtacctctactgaaccgtctgagggtagcgctccaggtagcgaaccggcaacctccggttctgaaactcca

SEQ ID NO: 603 - protein, 144 aa, Artificial Sequence
  Description of Artificial Sequence: Synthetic polypeptide
GASPGTSSTGSPGSSPSASTGTGPGSSTPSGATGSPGTSESATPESGPGSEPATSGSETPGSEPATSGSETPGTSESATPESGPGTSTEPSEGSAPGTSTEPSEGSAPGTSTEPSEGSAPGTSTEPSEGSAPGSEPATSGSETP

SEQ ID NO: 604 - DNA, 432 bp, Artificial Sequence
  Description of Artificial Sequence: Synthetic polynucleotide
ggtacctctaccgaaccttccgaaggtagcgctccaggtagcccggcaggttctcctacttccactgaggaaggtacttctaccgaaccttctgagggtagcgcaccaggtacctctgaaagcgcaactcctgagtctggcccaggtagcgaacctgctacctccggctctgagactccaggtacctctgaaagcgcaaccccggaatctggtccaggtagcccggctggctctcctacctctactgaggaaggtacttctgaaagcgctactcctgagtctggtccaggtacctctactgaaccgtccgaaggtagcgctccaggtagcgaacctgctacttctggttctgaaactccaggtacttctaccgaaccgtccgagggtagcgctccaggtagcgaacctgctacttctggttctgaaactcca

SEQ ID NO: 605 - protein, 144 aa, Artificial Sequence
  Description of Artificial Sequence: Synthetic polypeptide
GTSTEPSEGSAPGSPAGSPTSTEEGTSTEPSEGSAPGTSESATPESGPGSEPATSGSETPGTSESATPESGPGSPAGSPTSTEEGTSESATPESGPGTSTEPSEGSAPGSEPATSGSETPGTSTEPSEGSAPGSEPATSGSETP

SEQ ID NO: 606 - DNA, 432 bp, Artificial Sequence
  Description of Artificial Sequence: Synthetic polynucleotide
ggtacttctaccgaaccgtccgaaggcagcgctccaggtacctctactgaaccttccgagggcagcgctccaggtacctctaccgaaccttctgaaggtagcgcaccaggtacttctaccgaaccgtccgaaggcagcgctccaggtacctctactgaaccttccgagggcagcgctccaggtacctctaccgaaccttctgaaggtagcgcaccaggtacttctaccgaaccttccgagggcagcgcaccaggtacttctgaaagcgctacccctgagtccggcccaggtacttctgaaagcgctactcctgaatccggtccaggtacttctactgaaccttccgaaggtagcgctccaggtagcgaacctgctacttctggttctgaaaccccaggtagcccggctggctctccgacctccaccgaggaa

SEQ ID NO: 607 - protein, 144 aa, Artificial Sequence
  Description of Artificial Sequence: Synthetic polypeptide
GTSTEPSEGSAPGTSTEPSEGSAPGTSTEPSEGSAPGTSTEPSEGSAPGTSTEPSEGSAPGTSTEPSEGSAPGTSTEPSEGSAPGTSESATPESGPGTSESATPESGPGTSTEPSEGSAPGSEPATSGSETPGSPAGSPTSTEE

SEQ ID NO: 608 - DNA, 432 bp, Artificial Sequence
  Description of Artificial Sequence: Synthetic polynucleotide
ggtacttctaccgaaccgtccgagggcagcgctccaggtacttctactgaaccttctgaaggcagcgctccaggtacttctactgaaccttccgaaggtagcgcaccaggttctaccagcgaatccccttctggtactgctccaggttctaccagcgaatccccttctggcaccgcaccaggtacttctacccctgaaagcggctccgcttctccaggtagcgaacctgcaacctctggctctgaaaccccaggtacctctgaaagcgctactcctgaatctggcccaggtacttctactgaaccgtccgagggcagcgcaccaggtacttctactgaaccgtctgaaggtagcgcaccaggtacttctgaaagcgcaaccccggaatccggcccaggtacctctgaaagcgcaaccccggagtccggccca

SEQ ID NO: 609 - protein, 144 aa, Artificial Sequence
  Description of Artificial Sequence: Synthetic polypeptide
GTSTEPSEGSAPGTSTEPSEGSAPGTSTEPSEGSAPGSTSESPSGTAPGSTSESPSGTAPGTSTPESGSASPGSEPATSGSETPGTSESATPESGPGTSTEPSEGSAPGTSTEPSEGSAPGTSESATPESGPGTSESATPESGP

SEQ ID NO: 610 - DNA, 432 bp, Artificial Sequence
  Description of Artificial Sequence: Synthetic polynucleotide
ggtagctctaccccttctggtgctaccggctctccaggttctagcccgtctgcttctaccggtaccggtccaggtagctctaccccttctggtgctactggttctccaggtagccctgctggctctccgacttctactgaggaaggtagcccggctggttctccgacttctactgaggaaggtacttctaccgaaccttccgaaggtagcgctccaggtgcttccccgggcactagctctaccggttctccaggttctagcccttctgcatctactggtactggcccaggtactccgggcagcggtactgcttcttcctctccaggttctactagctctactgctgaatctcctggcccaggtacttctcctagcggtgaatcttctaccgctccaggtacctctactccggaaagcggttctgcatctcca

SEQ ID NO: 611 - protein, 144 aa, Artificial Sequence
  Description of Artificial Sequence: Synthetic polypeptide
GSSTPSGATGSPGSSPSASTGTGPGSSTPSGATGSPGSPAGSPTSTEEGSPAGSPTSTEEGTSTEPSEGSAPGASPGTSSTGSPGSSPSASTGTGPGTPGSGTASSSPGSTSSTAESPGPGTSPSGESSTAPGTSTPESGSASP

SEQ ID NO: 612 - DNA, 432 bp, Artificial Sequence
  Description of Artificial Sequence: Synthetic polynucleotide
ggtacctctactgaaccttctgagggcagcgctccaggtacttctgaaagcgctaccccggagtccggtccaggtacttctactgaaccgtccgaaggtagcgcaccaggtacttctactgaaccgtctgaaggtagcgcaccaggtacttctgaaagcgcaaccccggaatccggcccaggtacctctgaaagcgcaaccccggagtccggcccaggtactcctggcagcggtaccgcttcttcttctccaggtgcttctcctggtactagctctactggttctccaggtgcttctccgggcactagctctactggttctccaggtagccctgctggctctccgacttctactgaggaaggtagcccggctggttctccgacttctactgaggaaggtacttctaccgaaccttccgaaggtagcgctcca

SEQ ID NO: 613 - protein, 144 aa, Artificial Sequence
  Description of Artificial Sequence: Synthetic polypeptide
GTSTEPSEGSAPGTSESATPESGPGTSTEPSEGSAPGTSTEPSEGSAPGTSESATPESGPGTSESATPESGPGTPGSGTASSSPGASPGTSSTGSPGASPGTSSTGSPGSPAGSPTSTEEGSPAGSPTSTEEGTSTEPSEGSAP

SEQ ID NO: 614 - DNA, 432 bp, Artificial Sequence
  Description of Artificial Sequence: Synthetic polynucleotide
ggtagcccagcaggctctccgacttccactgaggaaggtacttctactgaaccttccgaaggcagcgcaccaggtacctctactgaaccttctgagggcagcgctccaggtacctctaccgaaccgtctgaaggtagcgcaccaggtacctctgaaagcgcaactcctgagtccggtccaggtacttctgaaagcgcaaccccggagtctggcccaggtaccccgggtagcggtactgcttcttcctctccaggtagctctaccccttctggtgcaaccggctctccaggtgcttctccgggcaccagctctaccggttctccaggtacctctactgaaccttctgagggcagcgctccaggtacttctgaaagcgctaccccggagtccggtccaggtacttctactgaaccgtccgaaggtagcgcacca

SEQ ID NO: 615 - protein, 144 aa, Artificial Sequence
  Description of Artificial Sequence: Synthetic polypeptide
GSPAGSPTSTEEGTSTEPSEGSAPGTSTEPSEGSAPGTSTEPSEGSAPGTSESATPESGPGTSESATPESGPGTPGSGTASSSPGSSTPSGATGSPGASPGTSSTGSPGTSTEPSEGSAPGTSESATPESGPGTSTEPSEGSAP

SEQ ID NO: 616 - DNA, 432 bp, Artificial Sequence
  Description of Artificial Sequence: Synthetic polynucleotide
ggtagcgaaccggcaacctccggctctgaaactccaggtacttctgaaagcgctactccggaatccggcccaggtagcgaaccggctacttccggctctgaaaccccaggtagctctaccccgtctggtgcaaccggctccccaggtactcctggtagcggtaccgcttcttcttctccaggtagctctactccgtctggtgctaccggctccccaggtgcatctcctggtaccagctctaccggttctccaggtagctctactccttctggtgctactggctctccaggtgcttccccgggtaccagctctaccggttctccaggtagcgaacctgctacttctggttctgaaactccaggtacttctaccgaaccgtccgagggtagcgctccaggtagcgaacctgctacttctggttctgaaactcca

SEQ ID NO: 617 - protein, 144 aa, Artificial Sequence
  Description of Artificial Sequence: Synthetic polypeptide
GSEPATSGSETPGTSESATPESGPGSEPATSGSETPGSSTPSGATGSPGTPGSGTASSSPGSSTPSGATGSPGASPGTSSTGSPGSSTPSGATGSPGASPGTSSTGSPGSEPATSGSETPGTSTEPSEGSAPGSEPATSGSETP

SEQ ID NO: 618 - DNA, 432 bp, Artificial Sequence
  Description of Artificial Sequence: Synthetic polynucleotide
ggtacctctactgaaccttccgaaggcagcgctccaggtacctctaccgaaccgtccgagggcagcgcaccaggtacttctgaaagcgcaacccctgaatccggtccaggtagccctgctggctctccgacttctactgaggaaggtagcccggctggttctccgacttctactgaggaaggtacttctaccgaaccttccgaaggtagcgctccaggtagcccggctggttctccgacttccaccgaggaaggtacctctactgaaccttctgagggtagcgctccaggtacctctactgaaccttccgaaggcagcgctccaggtgcttccccgggcaccagctctactggttctccaggttctagcccgtctgcttctactggtactggtccaggttctagcccttctgcttccactggtactggtcca

SEQ ID NO: 619 - protein, 144 aa, Artificial Sequence
  Description of Artificial Sequence: Synthetic polypeptide
GTSTEPSEGSAPGTSTEPSEGSAPGTSESATPESGPGSPAGSPTSTEEGSPAGSPTSTEEGTSTEPSEGSAPGSPAGSPTSTEEGTSTEPSEGSAPGTSTEPSEGSAPGASPGTSSTGSPGSSPSASTGTGPGSSPSASTGTGP

SEQ ID NO: 620 - DNA, 432 bp, Artificial Sequence
  Description of Artificial Sequence: Synthetic polynucleotide
ggtagctctaccccgtctggtgctaccggttccccaggtgcttctcctggtactagctctaccggttctccaggtagctctaccccgtctggtgctactggctctccaggtagccctgctggctctccaacctccaccgaagaaggtacctctgaaagcgcaacccctgaatccggcccaggtagcgaaccggcaacctccggttctgaaaccccaggtgcatctcctggtactagctctactggttctccaggtagctctactccgtctggtgcaaccggctctccaggttctagcccttctgcatctaccggtactggtccaggttctaccagcgaatccccttctggtactgctccaggttctaccagcgaatccccttctggcaccgcaccaggtacttctacccctgaaagcggctccgcttctcca

SEQ ID NO: 621 - protein, 144 aa, Artificial Sequence
  Description of Artificial Sequence: Synthetic polypeptide
GSSTPSGATGSPGASPGTSSTGSPGSSTPSGATGSPGSPAGSPTSTEEGTSESATPESGPGSEPATSGSETPGASPGTSSTGSPGSSTPSGATGSPGSSPSASTGTGPGSTSESPSGTAPGSTSESPSGTAPGTSTPESGSASP

SEQ ID NO: 622 - DNA, 432 bp, Artificial Sequence
  Description of Artificial Sequence: Synthetic polynucleotide
ggttctaccagcgaatctccttctggcaccgctccaggttctactagcgaatccccgtctggtaccgcaccaggtacttctcctagcggcgaatcttctaccgcaccaggtacctctgaaagcgctactccggagtctggcccaggtacctctactgaaccgtctgagggtagcgctccaggtacttctactgaaccgtccgaaggtagcgcaccaggtacctctactgaaccttctgagggcagcgctccaggtacttctgaaagcgctaccccggagtccggtccaggtacttctactgaaccgtccgaaggtagcgcaccaggtagctctaccccgtctggtgctaccggttccccaggtgcttctcctggtactagctctaccggttctccaggtagctctaccccgtctggtgctactggctctcca

SEQ ID NO: 623 - protein, 144 aa, Artificial Sequence
  Description of Artificial Sequence: Synthetic polypeptide
GSTSESPSGTAPGSTSESPSGTAPGTSPSGESSTAPGTSESATPESGPGTSTEPSEGSAPGTSTEPSEGSAPGTSTEPSEGSAPGTSESATPESGPGTSTEPSEGSAPGSSTPSGATGSPGASPGTSSTGSPGSSTPSGATGSP

SEQ ID NO: 624 - DNA, 432 bp, Artificial Sequence
  Description of Artificial Sequence: Synthetic polynucleotide
ggttctactagctctactgcagaatctccgggcccaggtacctctcctagcggtgaatcttctaccgctccaggtacttctccgagcggtgaatcttctaccgctccaggttctactagctctaccgctgaatctccgggtccaggttctaccagctctactgcagaatctcctggcccaggtacttctactccggaaagcggttccgcttctccaggtacttctcctagcggtgaatcttctaccgctccaggttctaccagctctactgctgaatctcctggcccaggtacttctaccccggaaagcggctccgcttctccaggttctaccagctctaccgctgaatctcctggcccaggttctactagcgaatctccgtctggcaccgcaccaggtacttcccctagcggtgaatcttctactgcacca

SEQ ID NO: 625 - protein, 144 aa, Artificial Sequence
  Description of Artificial Sequence: Synthetic polypeptide
GSTSSTAESPGPGTSPSGESSTAPGTSPSGESSTAPGSTSSTAESPGPGSTSSTAESPGPGTSTPESGSASPGTSPSGESSTAPGSTSSTAESPGPGTSTPESGSASPGSTSSTAESPGPGSTSESPSGTAPGTSPSGESSTAP

SEQ ID NO: 626 - DNA, 432 bp, Artificial Sequence
  Description of Artificial Sequence: Synthetic polynucleotide
ggtacctctactccggaaagcggttccgcatctccaggttctaccagcgaatccccgtctggcaccgcaccaggttctactagctctactgctgaatctccgggcccaggtacctctactgaaccttccgaaggcagcgctccaggtacctctaccgaaccgtccgagggcagcgcaccaggtacttctgaaagcgcaacccctgaatccggtccaggtacctctgaaagcgctactccggagtctggcccaggtacctctactgaaccgtctgagggtagcgctccaggtacttctactgaaccgtccgaaggtagcgcaccaggtacttctgaaagcgctactccggagtccggtccaggtacctctaccgaaccgtccgaaggcagcgctccaggtacttctactgaaccttctgagggtagcgctccc

SEQ ID NO: 627 - protein, 144 aa, Artificial Sequence
  Description of Artificial Sequence: Synthetic polypeptide
GTSTPESGSASPGSTSESPSGTAPGSTSSTAESPGPGTSTEPSEGSAPGTSTEPSEGSAPGTSESATPESGPGTSESATPESGPGTSTEPSEGSAPGTSTEPSEGSAPGTSESATPESGPGTSTEPSEGSAPGTSTEPSEGSAP

SEQ ID NO: 628 - DNA, 432 bp, Artificial Sequence
  Description of Artificial Sequence: Synthetic polynucleotide
ggtacctctaccgaaccgtccgagggtagcgcaccaggtacctctactgaaccgtctgagggtagcgctccaggtagcgaaccggcaacctccggttctgaaactccaggtacttctactgaaccgtctgaaggtagcgcaccaggtacttctgaaagcgcaaccccggaatccggcccaggtacctctgaaagcgcaaccccggagtccggcccaggtgcatctccgggtactagctctaccggttctccaggttctagcccttctgcttccactggtaccggcccaggtagctctaccccgtctggtgctactggttccccaggtagctctactccgtctggtgcaaccggttccccaggtagctctactccttctggtgctactggctccccaggtgcatcccctggcaccagctctaccggttctcca

SEQ ID NO: 629 - protein, 144 aa, Artificial Sequence
  Description of Artificial Sequence: Synthetic polypeptide
GTSTEPSEGSAPGTSTEPSEGSAPGSEPATSGSETPGTSTEPSEGSAPGTSESATPESGPGTSESATPESGPGASPGTSSTGSPGSSPSASTGTGPGSSTPSGATGSPGSSTPSGATGSPGSSTPSGATGSPGASPGTSSTGSP

SEQ ID NO: 630 - DNA, 432 bp, Artificial Sequence
  Description of Artificial Sequence: Synthetic polynucleotide
ggtagcgaaccggcaacctctggctctgaaactccaggtagcgaacctgcaacctccggctctgaaaccccaggtacttctactgaaccttctgagggcagcgcaccaggtagcgaacctgcaacctctggctctgaaaccccaggtacctctgaaagcgctactcctgaatctggcccaggtacttctactgaaccgtccgagggcagcgcaccaggtagctctactccgtctggtgctaccggctctccaggtagctctaccccttctggtgcaaccggctccccaggtgcttctccgggtaccagctctactggttctccaggtagctctaccccgtctggtgctaccggttccccaggtgcttctcctggtactagctctaccggttctccaggtagctctaccccgtctggtgctactggctctcca

SEQ ID NO: 631 - protein, 144 aa, Artificial Sequence
  Description of Artificial Sequence: Synthetic polypeptide
GSEPATSGSETPGSEPATSGSETPGTSTEPSEGSAPGSEPATSGSETPGTSESATPESGPGTSTEPSEGSAPGSSTPSGATGSPGSSTPSGATGSPGASPGTSSTGSPGSSTPSGATGSPGASPGTSSTGSPGSSTPSGATGSP

SEQ ID NO: 632 - DNA, 432 bp, Artificial Sequence
  Description of Artificial Sequence: Synthetic polynucleotide
ggtacttctaccgaaccgtccgagggcagcgctccaggtacttctactgaaccttctgaaggcagcgctccaggtacttctactgaaccttccgaaggtagcgcaccaggtacttctgaaagcgctactccggagtccggtccaggtacctctaccgaaccgtccgaaggcagcgctccaggtacttctactgaaccttctgagggtagcgctccaggttctactagcgaatctccgtctggcactgctccaggtacttctcctagcggtgaatcttctaccgctccaggtacttcccctagcggcgaatcttctaccgctccaggtagcccggctggctctcctacctctactgaggaaggtacttctgaaagcgctactcctgagtctggtccaggtacctctactgaaccgtccgaaggtagcgctcca

SEQ ID NO: 633 - protein, 144 aa, Artificial Sequence
  Description of Artificial Sequence: Synthetic polypeptide
GTSTEPSEGSAPGTSTEPSEGSAPGTSTEPSEGSAPGTSESATPESGPGTSTEPSEGSAPGTSTEPSEGSAPGSTSESPSGTAPGTSPSGESSTAPGTSPSGESSTAPGSPAGSPTSTEEGTSESATPESGPGTSTEPSEGSAP

SEQ ID NO: 634 - DNA, 432 bp, Artificial Sequence
  Description of Artificial Sequence: Synthetic polynucleotide
ggtacttctactgaaccttccgaaggtagcgctccaggtagcgaacctgctacttctggttctgaaaccccaggtagcccggctggctctccgacctccaccgaggaaggtagcccggcaggctctccgacctctactgaggaaggtacttctgaaagcgcaaccccggagtccggcccaggtacctctaccgaaccgtctgagggcagcgcaccaggtacctctactgaaccttccgaaggcagcgctccaggtacctctaccgaaccgtccgagggcagcgcaccaggtacttctgaaagcgcaacccctgaatccggtccaggtagctctactccgtctggtgcaaccggctccccaggttctagcccgtctgcttccactggtactggcccaggtgcttccccgggcaccagctctactggttctcca

SEQ ID NO: 635 - protein, 144 aa, Artificial Sequence
  Description of Artificial Sequence: Synthetic polypeptide
GTSTEPSEGSAPGSEPATSGSETPGSPAGSPTSTEEGSPAGSPTSTEEGTSESATPESGPGTSTEPSEGSAPGTSTEPSEGSAPGTSTEPSEGSAPGTSESATPESGPGSSTPSGATGSPGSSPSASTGTGPGASPGTSSTGSP

SEQ ID NO: 636 - DNA, 432 bp, Artificial Sequence
  Description of Artificial Sequence: Synthetic polynucleotide
ggtagcgaaccggctacttccggctctgagactccaggtagccctgctggctctccgacctctaccgaagaaggtacctctgaaagcgctacccctgagtctggcccaggtacctctactgaaccttccgaaggcagcgctccaggtacctctaccgaaccgtccgagggcagcgcaccaggtacttctgaaagcgcaacccctgaatccggtccaggtacctctactccggaaagcggttccgcatctccaggttctaccagcgaatccccgtctggcaccgcaccaggttctactagctctactgctgaatctccgggcccaggtacttctgaaagcgctactccggagtccggtccaggtacctctaccgaaccgtccgaaggcagcgctccaggtacttctactgaaccttctgagggtagcgctcca

SEQ ID NO: 637 - protein, 144 aa, Artificial Sequence
  Description of Artificial Sequence: Synthetic polypeptide
GSEPATSGSETPGSPAGSPTSTEEGTSESATPESGPGTSTEPSEGSAPGTSTEPSEGSAPGTSESATPESGPGTSTPESGSASPGSTSESPSGTAPGSTSSTAESPGPGTSESATPESGPGTSTEPSEGSAPGTSTEPSEGSAP

SEQ ID NO: 638 - DNA, 432 bp, Artificial Sequence
  Description of Artificial Sequence: Synthetic polynucleotide
ggtacttctaccgaaccgtccgagggcagcgctccaggtacttctactgaaccttctgaaggcagcgctccaggtacttctactgaaccttccgaaggtagcgcaccaggtacctctaccgaaccgtctgaaggtagcgcaccaggtacctctgaaagcgcaactcctgagtccggtccaggtacttctgaaagcgcaaccccggagtctggcccaggtactcctggcagcggtaccgcatcttcctctccaggtagctctactccgtctggtgcaactggttccccaggtgcttctccgggtaccagctctaccggttctccaggttccaccagctctactgctgaatctcctggtccaggtacctctcctagcggtgaatcttctactgctccaggtacttctactcctgaaagcggctctgcttctcca

SEQ ID NO: 639 - protein, 144 aa, Artificial Sequence
  Description of Artificial Sequence: Synthetic polypeptide
GTSTEPSEGSAPGTSTEPSEGSAPGTSTEPSEGSAPGTSTEPSEGSAPGTSESATPESGPGTSESATPESGPGTPGSGTASSSPGSSTPSGATGSPGASPGTSSTGSPGSTSSTAESPGPGTSPSGESSTAPGTSTPESGSASP

SEQ ID NO: 640 - DNA, 432 bp, Artificial Sequence
  Description of Artificial Sequence: Synthetic polynucleotide
ggtagcccggcaggctctccgacctctactgaggaaggtacttctgaaagcgcaaccccggagtccggcccaggtacctctaccgaaccgtctgagggcagcgcaccaggtacttctgaaagcgcaacccctgaatccggtccaggtagcgaaccggctacttctggctctgagactccaggtacttctaccgaaccgtccgaaggtagcgcaccaggtagcccggctggttctccgacttccaccgaggaaggtacctctactgaaccttctgagggtagcgctccaggtacctctactgaaccttccgaaggcagcgctccaggtacttctaccgaaccgtccgagggcagcgctccaggtacttctactgaaccttctgaaggcagcgctccaggtacttctactgaaccttccgaaggtagcgcacca

SEQ ID NO: 641 - protein, 144 aa, Artificial Sequence
  Description of Artificial Sequence: Synthetic polypeptide
GSPAGSPTSTEEGTSESATPESGPGTSTEPSEGSAPGTSESATPESGPGSEPATSGSETPGTSTEPSEGSAPGSPAGSPTSTEEGTSTEPSEGSAPGTSTEPSEGSAPGTSTEPSEGSAPGTSTEPSEGSAPGTSTEPSEGSAP

SEQ ID NO: 642 - DNA, 432 bp, Artificial Sequence
  Description of Artificial Sequence: Synthetic polynucleotide
ggtacttctccgagcggtgaatcttctaccgcaccaggttctactagctctaccgctgaatctccgggcccaggtacttctccgagcggtgaatcttctactgctccaggtacctctgaaagcgctactccggagtctggcccaggtacctctactgaaccgtctgagggtagcgctccaggtacttctactgaaccgtccgaaggtagcgcaccaggttctagcccttctgcatctactggtactggcccaggtagctctactccttctggtgctaccggctctccaggtgcttctccgggtactagctctaccggttctccaggtacttctactccggaaagcggttccgcatctccaggtacttctcctagcggtgaatcttctactgctccaggtacctctcctagcggcgaatcttctactgctcca

SEQ ID NO: 643 - protein, 144 aa, Artificial Sequence
  Description of Artificial Sequence: Synthetic polypeptide
GTSPSGESSTAPGSTSSTAESPGPGTSPSGESSTAPGTSESATPESGPGTSTEPSEGSAPGTSTEPSEGSAPGSSPSASTGTGPGSSTPSGATGSPGASPGTSSTGSPGTSTPESGSASPGTSPSGESSTAPGTSPSGESSTAP

SEQ ID NO: 644 - DNA, 432 bp, Artificial Sequence
  Description of Artificial Sequence: Synthetic polynucleotide
ggtacctctgaaagcgctactccggagtctggcccaggtacctctactgaaccgtctgagggtagcgctccaggtacttctactgaaccgtccgaaggtagcgcaccaggtagccctgctggctctccgacttctactgaggaaggtagcccggctggttctccgacttctactgaggaaggtacttctaccgaaccttccgaaggtagcgctccaggttctagcccttctgcttccaccggtactggcccaggtagctctaccccttctggtgctaccggctccccaggtagctctactccttctggtgcaactggctctccaggtagcgaaccggcaacttccggctctgaaaccccaggtacttctgaaagcgctactcctgagtctggcccaggtagcgaacctgctacctctggctctgaaacccca

SEQ ID NO: 645 - protein, 144 aa, Artificial Sequence
  Description of Artificial Sequence: Synthetic polypeptide
GTSESATPESGPGTSTEPSEGSAPGTSTEPSEGSAPGSPAGSPTSTEEGSPAGSPTSTEEGTSTEPSEGSAPGSSPSASTGTGPGSSTPSGATGSPGSSTPSGATGSPGSEPATSGSETPGTSESATPESGPGSEPATSGSETP

SEQ ID NO: 646 - DNA, 432 bp, Artificial Sequence
  Description of Artificial Sequence: Synthetic polynucleotide
ggtacttctaccgaaccgtccgaaggcagcgctccaggtacctctactgaaccttccgagggcagcgctccaggtacctctaccgaaccttctgaaggtagcgcaccaggtagctctaccccgtctggtgctaccggttccccaggtgcttctcctggtactagctctaccggttctccaggtagctctaccccgtctggtgctactggctctccaggtacttctgaaagcgcaacccctgaatccggtccaggtagcgaaccggctacttctggctctgagactccaggtacttctaccgaaccgtccgaaggtagcgcaccaggttctactagcgaatctccttctggcactgcaccaggttctaccagcgaatctccgtctggcactgcaccaggtacctctacccctgaaagcggttccgcttctcca

SEQ ID NO: 647 - protein, 144 aa, Artificial Sequence
  Description of Artificial Sequence: Synthetic polypeptide
GTSTEPSEGSAPGTSTEPSEGSAPGTSTEPSEGSAPGSSTPSGATGSPGASPGTSSTGSPGSSTPSGATGSPGTSESATPESGPGSEPATSGSETPGTSTEPSEGSAPGSTSESPSGTAPGSTSESPSGTAPGTSTPESGSASP

SEQ ID NO: 648 - DNA, 432 bp, Artificial Sequence
  Description of Artificial Sequence: Synthetic polynucleotide
ggtacctctactcctgaaagcggttctgcatctccaggttccactagctctaccgcagaatctccgggcccaggttctactagctctactgctgaatctcctggcccaggttctagcccttctgcatctactggtactggcccaggtagctctactccttctggtgctaccggctctccaggtgcttctccgggtactagctctaccggttctccaggtagcgaaccggcaacctccggctctgaaaccccaggtacctctgaaagcgctactcctgaatccggcccaggtagcccggcaggttctccgacttccactgaggaaggttctactagcgaatctccttctggcactgcaccaggttctaccagcgaatctccgtctggcactgcaccaggtacctctacccctgaaagcggttccgcttctccc

SEQ ID NO: 649 - protein, 144 aa, Artificial Sequence
  Description of Artificial Sequence: Synthetic polypeptide
GTSTPESGSASPGSTSSTAESPGPGSTSSTAESPGPGSSPSASTGTGPGSSTPSGATGSPGASPGTSSTGSPGSEPATSGSETPGTSESATPESGPGSPAGSPTSTEEGSTSESPSGTAPGSTSESPSGTAPGTSTPESGSASP

SEQ ID NO: 650 - DNA, 432 bp, Artificial Sequence
  Description of Artificial Sequence: Synthetic polynucleotide
ggtagcccggctggctctcctacctctactgaggaaggtacttctgaaagcgctactcctgagtctggtccaggtacctctactgaaccgtccgaaggtagcgctccaggttctaccagcgaatctccttctggcaccgctccaggttctactagcgaatccccgtctggtaccgcaccaggtacttctcctagcggcgaatcttctaccgcaccaggtacctctaccgaaccttccgaaggtagcgctccaggtagcccggcaggttctcctacttccactgaggaaggtacttctaccgaaccttctgagggtagcgcaccaggtagcgaacctgcaacctctggctctgaaaccccaggtacctctgaaagcgctactcctgaatctggcccaggtacttctactgaaccgtccgagggcagcgcacca

SEQ ID NO: 651 - protein, 144 aa, Artificial Sequence
  Description of Artificial Sequence: Synthetic polypeptide
GSPAGSPTSTEEGTSESATPESGPGTSTEPSEGSAPGSTSESPSGTAPGSTSESPSGTAPGTSPSGESSTAPGTSTEPSEGSAPGSPAGSPTSTEEGTSTEPSEGSAPGSEPATSGSETPGTSESATPESGPGTSTEPSEGSAP

SEQ ID NO: 652 - DNA, 432 bp, Artificial Sequence
  Description of Artificial Sequence: Synthetic polynucleotide
ggtacctctaccgaaccttccgaaggtagcgctccaggtagcccggcaggttctcctacttccactgaggaaggtacttctaccgaaccttctgagggtagcgcaccaggtacctcccctagcggcgaatcttctactgctccaggtacctctcctagcggcgaatcttctaccgctccaggtacctcccctagcggtgaatcttctaccgcaccaggttctaccagcgaatccccttctggtactgctccaggttctaccagcgaatccccttctggcaccgcaccaggtacttctacccctgaaagcggctccgcttctccaggtagcgaacctgcaacctctggctctgaaaccccaggtacctctgaaagcgctactcctgaatctggcccaggtacttctactgaaccgtccgagggcagcgcacca

SEQ ID NO: 653 - protein, 144 aa, Artificial Sequence
  Description of Artificial Sequence: Synthetic polypeptide
GTSTEPSEGSAPGSPAGSPTSTEEGTSTEPSEGSAPGTSPSGESSTAPGTSPSGESSTAPGTSPSGESSTAPGSTSESPSGTAPGSTSESPSGTAPGTSTPESGSASPGSEPATSGSETPGTSESATPESGPGTSTEPSEGSAP

SEQ ID NO: 654 - DNA, 432 bp, Artificial Sequence
  Description of Artificial Sequence: Synthetic polynucleotide
ggtagcgaaccggcaacctctggctctgaaaccccaggtacctctgaaagcgctactccggaatctggtccaggtacttctgaaagcgctactccggaatccggtccaggtacttctccgagcggtgaatcttctaccgcaccaggttctactagctctaccgctgaatctccgggcccaggtacttctccgagcggtgaatcttctactgctccaggttctactagcgaatccccgtctggtactgctccaggtacttcccctagcggtgaatcttctactgctccaggttctaccagctctaccgcagaatctccgggtccaggtagctctactccgtctggtgcaaccggttccccaggtagctctaccccttctggtgcaaccggctccccaggtagctctaccccttctggtgcaaactggctctcc

SEQ ID NO: 655 - protein, 144 aa, Artificial Sequence
  Description of Artificial Sequence: Synthetic polypeptide
GSEPATSGSETPGTSESATPESGPGTSESATPESGPGTSPSGESSTAPGSTSSTAESPGPGTSPSGESSTAPGSTSESPSGTAPGTSPSGESSTAPGSTSSTAESPGPGSSTPSGATGSPGSSTPSGATGSPGSSTPSGANWLS

SEQ ID NO: 656 - DNA, 432 bp, Artificial Sequence
  Description of Artificial Sequence: Synthetic polynucleotide
ggtagccctgctggctctccgacttctactgaggaaggtagcccggctggttctccgacttctactgaggaaggtacttctaccgaaccttccgaaggtagcgctccaggtacctctactgaaccttccgaaggcagcgctccaggtacctctaccgaaccgtccgagggcagcgcaccaggtacttctgaaagcgcaacccctgaatccggtccaggtgcatctcctggtaccagctctaccggttctccaggtagctctactccttctggtgctactggctctccaggtgcttccccgggtaccagctctaccggttctccaggtagctctaccccgtctggtgctactggttctccaggtactccgggcagcggtactgcttcttcctctccaggtagctctaccccttctggtgctactggctctcca

SEQ ID NO: 657 - protein, 144 aa, Artificial Sequence
  Description of Artificial Sequence: Synthetic polypeptide
GSPAGSPTSTEEGSPAGSPTSTEEGTSTEPSEGSAPGTSTEPSEGSAPGTSTEPSEGSAPGTSESATPESGPGASPGTSSTGSPGSSTPSGATGSPGASPGTSSTGSPGSSTPSGATGSPGTPGSGTASSSPGSSTPSGATGSP

SEQ ID NO: 658 - DNA, 432 bp, Artificial Sequence
  Description of Artificial Sequence: Synthetic polynucleotide
ggtagctctaccccgtctggtgctactggttctccaggtactccgggcagcggtactgcttcttcctctccaggtagctctaccccttctggtgctactggctctccaggtagcccggctggctctcctacctctactgaggaaggtacttctgaaagcgctactcctgagtctggtccaggtacctctactgaaccgtccgaaggtagcgctccaggtacctctgaaagcgcaactcctgagtctggcccaggtagcgaacctgctacctccggctctgagactccaggtacctctgaaagcgcaaccccggaatctggtccaggtacttctactgaaccgtctgaaggtagcgcaccaggtacttctgaaagcgcaaccccggaatccggcccaggtacctctgaaagcgcaaccccggagtccggccca

SEQ ID NO: 659 - protein, 144 aa, Artificial Sequence
  Description of Artificial Sequence: Synthetic polypeptide
GSSTPSGATGSPGTPGSGTASSSPGSSTPSGATGSPGSPAGSPTSTEEGTSESATPESGPGTSTEPSEGSAPGTSESATPESGPGSEPATSGSETPGTSESATPESGPGTSTEPSEGSAPGTSESATPESGPGTSESATPESGP

SEQ ID NO: 660 - DNA, 57 bp, Artificial Sequence
  Description of Artificial Sequence: Synthetic oligonucleotide
aggtgcaagcgcaagcggcgcgccaagcacgggaggttcgtcttcactcgagggtac

SEQ ID NO: 661 - DNA, 49 bp, Artificial Sequence
  Description of Artificial Sequence: Synthetic oligonucleotide
cctcgagtgaagacgaacctcccgtgcttggcgcgccgcttgcgcttgc

SEQ ID NO: 662 - protein, 11 aa, Artificial Sequence
  Description of Artificial Sequence: Synthetic peptide
GASASGAPSTG

SEQ ID NO: 663 - DNA, 57 bp, Artificial Sequence
  Description of Artificial Sequence: Synthetic oligonucleotide
aggtccagaaccaacggggccggccccaagcggaggttcgtcttcactcgagggtac

SEQ ID NO: 664 - DNA, 49 bp, Artificial Sequence
  Description of Artificial Sequence: Synthetic oligonucleotide
cctcgagtgaagacgaacctccgcttggggccggccccgttggttctgg

SEQ ID NO: 665 - protein, 11 aa, Artificial Sequence
  Description of Artificial Sequence: Synthetic peptide
GPEPTGPAPSG

SEQ ID NO: 666 - DNA, 43 bp, Artificial Sequence
  Description of Artificial Sequence: Synthetic primer
tattcccgtacggccgccaccatgcaaatagagctctccacct

SEQ ID NO: 667 - DNA, 32 bp, Artificial Sequence
  Description of Artificial Sequence: Synthetic primer
ggtgacctcgagcgtagaggtcctgtgcctcg

SEQ ID NO: 668 - protein, 6 aa, Artificial Sequence
  Description of Artificial Sequence: Synthetic peptide
ARGHPF

SEQ ID NO: 669 - protein, 5 aa, Artificial Sequence
  Description of Artificial Sequence: Synthetic peptide
NMHTG

SEQ ID NO: 670 - protein, 5 aa, Artificial Sequence
  Description of Artificial Sequence: Synthetic peptide
SPATG

SEQ ID NO: 671 - DNA, 21 bp, Artificial Sequence
  Description of Artificial Sequence: Synthetic primer
gtgaactctctagacccaccg

SEQ ID NO: 672 - DNA, 37 bp, Artificial Sequence
  Description of Artificial Sequence: Synthetic primer
ctcctcgaggtcgactcagtagaggtcctgtgcctcg

SEQ ID NO: 673 - DNA, 92 bp, Artificial Sequence
  Description of Artificial Sequence: Synthetic primer
cgaaagcgctacgcctgagagtggccctggctctgagccagccacctccggctctgaaacccctgcctcgagcccaccagtcttgaaacgcc

SEQ ID NO: 674 - DNA, 42 bp, Artificial Sequence
  Description of Artificial Sequence: Synthetic primer
tgatatggtatcatcataatcgatttcctcttgatctgactg

SEQ ID NO: 675 - DNA, 20 bp, Artificial Sequence
  Description of Artificial Sequence: Synthetic primer
agcttgaggatccagagttc

SEQ ID NO: 676 - DNA, 95 bp, Artificial Sequence
  Description of Artificial Sequence: Synthetic primer
tctcaggcgtagcgctttcgcttgtcccctcttctgttgaggtgggggagccagcaggagaacctggcgcgccgttttgagagaagcttcttggt

SEQ ID NO: 677 - DNA, 39 bp, Artificial Sequence
  Description of Artificial Sequence: Synthetic primer
tctcaaaacggcgcgccaggtacctcagagtctgctacc

SEQ ID NO: 678 - DNA, 30 bp, Artificial Sequence
  Description of Artificial Sequence: Synthetic primer
tggtgggctcgaggctggcgcactgccttc

SEQ ID NO: 679 - DNA, 39 bp, Artificial Sequence; identical to SEQ ID NO: 677
  Description of Artificial Sequence: Synthetic primer

SEQ ID NO: 680 - DNA, 30 bp, Artificial Sequence; identical to SEQ ID NO: 678
  Description of Artificial Sequence: Synthetic primer

SEQ ID NO: 681 - DNA, 36 bp, Artificial Sequence
  Description of Artificial Sequence: Synthetic primer
ggggccgaaacggccggtacctcagagtctgctacc

SEQ ID NO: 682 - DNA, 35 bp, Artificial Sequence
  Description of Artificial Sequence: Synthetic primer
tgttcggccgtttcggcccctggcgcactgccttc

SEQ ID NO: 683 - DNA, 29 bp, Artificial Sequence
  Description of Artificial Sequence: Synthetic primer
ggggccgaaacggccccgggagcgtcacc

SEQ ID NO: 684 - DNA, 35 bp, Artificial Sequence
  Description of Artificial Sequence: Synthetic primer
tgttcggccgtttcggcccctgacccggttgcccc

SEQ ID NO: 685 - DNA, 20 bp, Artificial Sequence
  Description of Artificial Sequence: Synthetic primer
atgatggcatggaagcctat

SEQ ID NO: 686 - DNA, 91 bp, Artificial Sequence
  Description of Artificial Sequence: Synthetic primer
atccctcaccttcgccagaaccttcagaaccctcaccttcagaaccttcaccagaaccttcaccatcttccgcttcttcattatttttcat

SEQ ID NO: 687 - DNA, 93 bp, Artificial Sequence
  Description of Artificial Sequence: Synthetic primer
ttctggcgaaggtgagggatctgaaggcggttctgaaggtgaaggtggctctgagggttccgaatatgatgatgatcttactgattctgaaat

SEQ ID NO: 688 - DNA, 21 bp, Artificial Sequence
  Description of Artificial Sequence: Synthetic primer
tattctctgtgaggtaccagc

SEQ ID NO: 689 - DNA, 21 bp, Artificial Sequence
  Description of Artificial Sequence: Synthetic primer
tattctctgtgaggtaccagc

SEQ ID NO: 690 - DNA, 67 bp, Artificial Sequence
  Description of Artificial Sequence: Synthetic primer
gaagctggtacctcacagagaatatacaacgctttctccccaatccaggtgaaggttctggtgaagg

SEQ ID NO: 691 - DNA, 47 bp, Artificial Sequence
  Description of Artificial Sequence: Synthetic primer
aactctggatcctcaagctgcactccagcttcggaaccctcagagcc

SEQ ID NO: 692 - protein, 1010 aa, Artificial Sequence
  Description of Artificial Sequence: Synthetic polypeptide
MAYTDETFKTREAIQHESGILGPLLYGEVGDTLLIIFKNQASRPYNIYPHGITDVRPLYSRRLPKGVKHLKDFPILPGEIFKYKWTVTVEDGPTKSDPRCLTRYYSSFVNMERDLASGLIGPLLICYKESVDQRGNQIMSDKRNVILFSVFDENRSWYLTENIQRFLPNPAGVQLEDPEFQASNIMHSINGYVFDSLQLSVCLHEVAYWYILSIGAQTDFLSVFFSGYTFKHKMVYEDTLTLFPFSGETVFMSMENPGLWILGCHNSDFRNRGMTALLKVSSCDKNTGDYYEDSYEDISAYLLSKNNAIEPRSFSQNPPVLKRHQREITRTTLQSDQEEIDYDDTISVEMKKEDFDIYDEDENQSPRSFQKKTRHYFIAAVERLWDYGMSSSPHVLRNRAQSGSVPQFKKVVFQEFTDGSFTQPLYRGELNEHLGLLGPYIRAEVEDNIMVTFRNQASRPYSFYSSLISYEEDQRQGAEPRKNFVKPNETKTYFWKVQHHMAPTKDEFDCKAWAYFSDVDLEKDVHSGLIGPLLVCHTNTLNPAHGRQVTVQEFALFFTIFDETKSWYFTENMERNCRAPCNIQMEDPTFKENYRFHAINGYIMDTLPGLVMAQDQRIRWYLLSMGSNENIHSIHFSGHVFTVRKKEEYKMALYNLYPGVFETVEMLPSKAGIWRVECLIGEHLHAGMSTLFLVYSNKCQTPLGMASGHIRDFQITASGQYGQWAPKLARLHYSGSINAWSTKEPFSWIKVDLLAPMIIHGIKTQGARQKFSSLYISQFIIMYSLDGKKWQTYRGNSTGTLMVFFGNVDSSGIKHNIFNPPIIARYIRLHPTHYSIRSTLRMELMGCDLNSCSMPLGMESKAISDAQITASSYFTNMFATWSPSKARLHLQGRSNAWRPQVNNPKEWLQVDFQKTMKVTGVTTQGVKSLLTSMYVKEFLISSSQDGHQWTLFFQNGKVKVFQGNQDSFTPVVNSLDPPLLTRYLRIHPQSWVHQIALRMEVLGCEAQDLY

SEQ ID NO: 693 - DNA, 3033 bp, Artificial Sequence
  Description of Artificial Sequence: Synthetic polynucleotide
atggcatacacagatgaaacctttaagactcgtgaagctattcagcatgaatcaggaatcttgggacctttactttatggggaagttggagacacactgttgattatatttaagaatcaagcaagcagaccatataacatctaccctcacggaatcactgatgtccgtcctttgtattcaaggagattaccaaaaggtgtaaaacatttgaaggattttccaattctgccaggagaaatattcaaatataaatggacagtgactgtagaagatgggccaactaaatcagatcctcggtgcctgacccgctattactctagtttcgttaatatggagagagatctagcttcaggactcattggccctctcctcatctgctacaaagaatctgtagatcaaagaggaaaccagataatgtcagacaagaggaatgtcatcctgttttctgtatttgatgagaaccgaagctggtacctcacagagaatatacaacgctttctccccaatccagctggagtgcagcttgaggatccagagttccaagcctccaacatcatgcacagcatcaatggctatgtttttgatagtttgcagttgtcagtttgtttgcatgaggtggcatactggtacattctaagcattggagcacagactgacttcctttctgtcttcttctctggatataccttcaaacacaaaatggtctatgaagacacactcaccctattcccattctcaggagaaactgtcttcatgtcgatggaaaacccaggtctatggattctggggtgccacaactcagactttcggaacagaggcatgaccgccttactgaaggtttctagttgtgacaagaacactggtgattattacgaggacagttatgaagatatttcagcatacttgctgagtaaaaacaatgccattgaaccaagaagcttctctcaaaacccaccagtcttgaaacgccatcaacgggaaataactcgtactactcttcagtcagatcaagaggaaattgactatgatgataccatatcagttgaaatgaagaaggaagattttgacatttatgatgaggatgaaaatcagagcccccgcagctttcaaaagaaaacacgacactattttattgctgcagtggagaggctctgggattatgggatgagtagctccccacatgttctaagaaacagggctcagagtggcagtgtccctcagttcaagaaagttgttttccaggaatttactgatggctcctttactcagcccttataccgtggagaactaaatgaacatttgggactcctggggccatatataagagcagaagttgaagataatatcatggtaactttcagaaatcaggcctctcgtccctattccttctattctagccttatttcttatgaggaagatcagaggcaaggagcagaacctagaaaaaactttgtcaagcctaatgaaaccaaaacttacttttggaaagtgcaacatcatatggcacccactaaagatgagtttgactgcaaagcctgggcttatttctctgatgttgacctggaaaaagatgtgcactcaggcctgattggaccccttctggtctgccacactaacacactgaaccctgctcatgggagacaagtgacagtacaggaatttgctctgtttttcaccatctttgatgagaccaaaagctggtacttcactgaaaatatggaaagaaactgcagggctccctgcaatatccagatggaagatcccacttttaaagagaattatcgcttccatgcaatcaatggctacataatggatacactacctggcttagtaatggctcaggatcaaaggattcgatggtatctgctcagcatgggcagcaatgaaaacatccattctattcatttcagtggacatgtgttcactgtacgaaaaaaagaggagtataaaatggcactgtacaatctctatccaggtgtttttgagacagtggaaatgttaccatccaaagctggaatttggcgggtggaatgccttattggcgagcatctacatgctgggatgagcacactttttctggtgtacagcaataagtgtcagactcccctgggaatggcttctggacacattagagattttcagattacagcttcaggacaatatggacagtgggccccaaagctggccagacttcattattccggatcaatcaatgcctggagcaccaaggagcccttttcttggatcaaggtggatctgttggcaccaatgattattcacggcatcaagacccagggtgcccgtcagaagttctccagcctctacatctctcagtttatcatcatgtatagtcttgatgggaagaagtggcagacttatcgaggaaattccactggaaccttaatggtcttctttggcaatgtggattcatctgggataaaacacaatatttttaaccctccaattattgctcgatacatccgtttgcacccaactcattatagcattcgcagcactcttcgcatggagttgatgggctgtgatttaaatagttgcagcatgccattgggaatggagagtaaagcaatatcagatgcacagattactgcttcatcctactttaccaatatgtttgccacctggtctccttcaaaagctcgacttcacctccaagggaggagtaatgcctggagacctcaggtgaataatccaaaagagtggctgcaagtggacttccagaagacaatgaaagtcacaggagtaactactcagggagtaaaatctctgcttaccagcatgtatgtgaaggagttcctcatctccagcagtcaagatggccatcagtggactctcttttttcagaatggcaaagtaaaggtttttcagggaaatcaagactccttcacacctgtggtgaactctctagacccaccgttactgactcgctaccttcgaattcacccccagagttgggtgcaccagattgccctgaggatggaggttctgggctgcgaggcacaggacctctactga

SEQ ID NO: 694 - protein, 1482 aa, Artificial Sequence
  Description of Artificial Sequence: Synthetic polypeptide
MQIELSTCFFLCLLRFCFSATRRYYLGAVELSWDYMQSDLGELPVDARFPPRVPKSFPFNTSVVYKKTLFVEFTDHLFNIAKPRPPWMGLLGPTIQAEVYDTVVITLKNMASHPVSLHAVGVSYWKASEGAEYDDQTSQREKEDDKVFPGGSHTYVWQVLKENGPMASDPLCLTYSYLSHVDLVKDLNSGLIGALLVCREGSLAKEKTQTLHKFILLFAVFDEGKSWHSETKNSLMQDRDAASARAWPKMHTVNGYVNRSLPGLIGCHRKSVYWHVIGMGTTPEVHSIFLEGHTFLVRNHRQASLEISPITFLTAQTLLMDLGQFLLFCHISSHQHDGMEAYVKVDSCPEEPQLRMKNNEEAEDYDDDLTDSEMDVVRFDDDNSPSFIQIRSVAKKHPKTWVHYIAAEEEDWDYAPLVLAPDDRSYKSQYLNNGPQRIGRKYKKVRFMAYTDETFKTREAIQHESGILGPLLYGEVGDTLLIIFKNQASRPYNIYPHGITDVRPLYSRRLPKGVKHLKDFPILPGEIFKYKWTVTVEDGPTKSDPRCLTRYYSSFVNMERDLASGLIGPLLICYKESVDQRGNQIMSDKRNVILFSVFDENRSWYLTENIQRFLPNPAGVQLEDPEFQASNIMHSINGYVFDSLQLSVCLHEVAYWYILSIGAQTDFLSVFFSGYTFKHKMVYEDTLTLFPFSGETVFMSMENPGLWILGCHNSDFRNRGMTALLKVSSCDKNTGDYYEDSYEDISAYLLSKNNAIEPRSFSQNPPVLKRHQREITRTTLQSDQEEIDYDDTISVEMKKEDFDIYDEDENQSPRSFQKKTRHYFIAAVERLWDYGMSSSPHVLRNRAQSGSVPQFKKVVFQEFTDGSFTQPLYRGELNEHLGLLGPYIRAEVEDNIMVTFRNQASRPYSFYSSLISYEEDQRQGAEPRKNFVKPNETKTYFWKVQHHMAPTKDEFDCKAWAYFSDVDLEKDVHSGLIGPLLVCHTNTLNPAHGRQVTVQEFALFFTIFDETKSWYFTENMERNCRAPCNIQMEDPTFKENYRFHAINGYIMDTLPGLVMAQDQRIRWYLLSMGSNENIHSIHFSGHVFTVRKKEEYKMALYNLYPGVFETVEMLPSKAGIWRVECLIGEHLHAGMSTLFLVYSNKCQTPLGMASGHIRDFQITASGQYGQWAPKLARLHYSGSINAWSTKEPFSWIKVDLLAPMIIHGIKTQGARQKFSSLYISQFIIMYSLDGKKWQTYRGNSTGTLMVFFGNVDSSGIKHNIFNPPIIARYIRLHPTHYSIRSTLRMELMGCDLNSCSMPLGMESKAISDAQITASSYFTNMFATWSPSKARLHLQGRSNAWRPQVNNPKEWLQVDFQKTMKVTGVTTQGVKSLLTSMYVKEFLISSSQDGHQWTLFFQNGKVKVFQGNQDSFTPVVNSLDPPLLTRYLRIHPQSWVHQIALRMEVLGCEAQDLYGAGSPGAETAEQKLISEEDLSPATG

SEQ ID NO: 695 - DNA, 4449 bp, Artificial Sequence
  Description of Artificial Sequence: Synthetic polynucleotide
atgcaaatagagctctccacctgcttctttctgtgccttttgcgattctgctttagtgccaccagaagatactacctgggtgcagtggaactgtcatgggactatatgcaaagtgatctcggtgagctgcctgtggacgcaagatttcctcctagagtgccaaaatcttttccattcaacacctcagtcgtgtacaaaaagactctgtttgtagaattcacggatcaccttttcaacatcgctaagccaaggccaccctggatgggtctgctaggtcctaccatccaggctgaggtttatgatacagtggtcattacacttaagaacatggcttcccatcctgtcagtcttcatgctgttggtgtatcctactggaaagcttctgagggagctgaatatgatgatcagaccagtcaaagggagaaagaagatgataaagtcttccctggtggaagccatacatatgtctggcaggtcctgaaagagaatggtccaatggcctctgacccactgtgccttacctactcatatctttctcatgtggacctggtaaaagacttgaattcaggcctcattggagccctactagtatgtagagaagggagtctggccaaggaaaagacacagaccttgcacaaatttatactactttttgctgtatttgatgaagggaaaagttggcactcagaaacaaagaactccttgatgcaggatagggatgctgcatctgctcgggcctggcctaaaatgcacacagtcaatggttatgtaaacaggtctctgccaggtctgattggatgccacaggaaatcagtctattggcatgtgattggaatgggcaccactcctgaagtgcactcaatattcctcgaaggtcacacatttcttgtgaggaaccatcgccaggctagcttggaaatctcgccaataactttccttactgctcaaacactcttgatggaccttggacagtttctactgttttgtcatatctcttcccaccaacatgatggcatggaagcttatgtcaaagtagacagctgtccagaggaaccccaactacgaatgaaaaataatgaagaagcggaagactatgatgatgatcttactgattctgaaatggatgtggtcaggtttgatgatgacaactctccttcctttatccaaattcgctcagttgccaagaagcatcctaaaacttgggtacattacattgctgctgaagaggaggactgggactatgctcccttagtcctcgcccccgatgacagaagttataaaagtcaatatttgaacaatggccctcagcggattggtaggaagtacaaaaaagtccgatttatggcatacacagatgaaacctttaagactcgtgaagctattcagcatgaatcaggaatcttgggacctttactttatggggaagttggagacacactgttgattatatttaagaatcaagcaagcagaccatataacatctaccctcacggaatcactgatgtccgtcctttgtattcaaggagattaccaaaaggtgtaaaacatttgaaggattttccaattctgccaggagaaatattcaaatataaatggacagtgactgtagaagatgggccaactaaatcagatcctcggtgcctgacccgctattactctagtttcgttaatatggagagagatctagcttcaggactcattggccctctcctcatctgctacaaagaatctgtagatcaaagaggaaaccagataatgtcagacaagaggaatgtcatcctgttttctgtatttgatgagaaccgaagctggtacctcacagagaatatacaacgctttctccccaatccagctggagtgcagcttgaggatccagagttccaagcctccaacatcatgcacagcatcaatggctatgtttttgatagtttgcagttgtcagtttgtttgcatgaggtggcatactggtacattctaagcattggagcacagactgacttcctttctgtcttcttctctggatataccttcaaacacaaaatggtctatgaagacacactcaccctattcccattctcaggagaaactgtcttcatgtcgatggaaaacccaggtctatggattctggggtgccacaactcagactttcggaacagaggcatgaccgccttactgaaggtttctagttgtgacaagaacactggtgattattacgaggacagttatgaagatatttcagcatacttgctgagtaaaaacaatgccattgaaccaagaagcttctctcaaaacccaccagtcttgaaacgccatcaacgggaaataactcgtactactcttcagtcagatcaagaggaaatcgattatgatgataccatatcagttgaaatgaagaaggaagattttgacatttatgatgaggatgaaaatcagagcccccgcagctttcaaaagaaaacacgacactattttattgctgcagtggagaggctctgggattatgggatgagtagctccccacatgttctaagaaacagggctcagagtggcagtgtccctcagttcaagaaagttgttttccaggaatttactgatggctcctttactcagcccttataccgtggagaactaaatgaacatttgggactcctggggccatatataagagcagaagttgaagataatatcatggtaactttcagaaatcaggcctctcgtccctattccttctattctagccttatttcttatgaggaagatcagaggcaaggagcagaacctagaaaaaactttgtcaagcctaatgaaaccaaaacttacttttggaaagtgcaacatcatatggcacccactaaagatgagtttgactgcaaagcctgggcttatttctctgatgttgacctggaaaaagatgtgcactcaggcctgattggaccccttctggtctgccacactaacacactgaaccctgctcatgggagacaagtgacagtacaggaatttgctctgtttttcaccatctttgatgagaccaaaagctggtacttcactgaaaatatggaaagaaactgcagggctccctgcaatatccagatggaagatcccacttttaaagagaattatcgcttccatgcaatcaatggctacataatggatacactacctggcttagtaatggctcaggatcaaaggattcgatggtatctgctcagcatgggcagcaatgaaaacatccattctattcatttcagtggacatgtgttcactgtacgaaaaaaagaggagtataaaatggcactgtacaatctctatccaggtgtttttgagacagtggaaatgttaccatccaaagctggaatttggcgggtggaatgccttattggcgagcatctacatgctgggatgagcacactttttctggtgtacagcaataagtgtcagactcccctgggaatggcttctggacacattagagattttcagattacagcttcaggacaatatggacagtgggccccaaagctggccagacttcattattccggatcaatcaatgcctggagcaccaaggagcccttttcttggatcaaggtggatctgttggcaccaatgattattcacggcatcaagacccagggtgcccgtcagaagttctccagcctctacatctctcagtttatcatcatgtatagtcttgatgggaagaagtggcagacttatcgaggaaattccactggaaccttaatggtcttctttggcaatgtggattcatctgggataaaacacaatatttttaaccctccaattattgctcgatacatccgtttgcacccaactcattatagcattcgcagcactcttcgcatggagttgatgggctgtgatttaaatagttgcagcatgccattgggaatggagagtaaagcaatatcagatgcacagattactgcttcatcctactttaccaatatgtttgccacctggtctccttcaaaagctcgacttcacctccaagggaggagtaatgcctggagacctcaggtgaataatccaaaagagtggctgcaagtggacttccagaagacaatgaaagtcacaggagtaactactcagggagtaaaatctctgcttaccagcatgtatgtgaaggagttcctcatctccagcagtcaagatggccatcagtggactctcttttttcagaatggcaaagtaaaggtttttcagggaaatcaagactccttcacacctgtggtgaactctctagacccaccgttactgactcgctaccttcgaattcacccccagagttgggtgcaccagattgccctgaggatggaggttctgggctgcgaggcacaggacctctacggcgccggatcacctggggccgaaacggccgaacaaaaactcatctcagaagaggatctgtcacctgcaaccggttga

SEQ ID NO: 696 - protein, 1524 aa, Artificial Sequence
  Description of Artificial Sequence: Synthetic polypeptide
MQIELSTCFFLCLLRFCFSATRGAPGSPAGSPTSTEEGTSESATPESGPGSEPATSGSETPASSRYYLGAVELSWDYMQSDLGELPVDARFPPRVPKSFPFNTSVVYKKTLFVEFTDHLFNIAKPRPPWMGLLGPTIQAEVYDTVVITLKNMASHPVSLHAVGVSYWKASEGAEYDDQTSQREKEDDKVFPGGSHTYVWQVLKENGPMASDPLCLTYSYLSHVDLVKDLNSGLIGALLVCREGSLAKEKTQTLHKFILLFAVFDEGKSWHSETKNSLMQDRDAASARAWPKMHTVNGYVNRSLPGLIGCHRKSVYWHVIGMGTTPEVHSIFLEGHTFLVRNHRQASLEISPITFLTAQTLLMDLGQFLLFCHISSHQHDGMEAYVKVDSCPEEPQLRMKNNEEAEDYDDDLTDSEMDVVRFDDDNSPSFIQIRSVAKKHPKTWVHYIAAEEEDWDYAPLVLAPDDRSYKSQYLNNGPQRIGRKYKKVRFMAYTDETFKTREAIQHESGILGPLLYGEVGDTLLIIFKNQASRPYNIYPHGITDVRPLYSRRLPKGVKHLKDFPILPGEIFKYKWTVTVEDGPTKSDPRCLTRYYSSFVNMERDLASGLIGPLLICYKESVDQRGNQIMSDKRNVILFSVFDENRSWYLTENIQRFLPNPAGVQLEDPEFQASNIMHSINGYVFDSLQLSVCLHEVAYWYILSIGAQTDFLSVFFSGYTFKHKMVYEDTLTLFPFSGETVFMSMENPGLWILGCHNSDFRNRGMTALLKVSSCDKNTGDYYEDSYEDISAYLLSKNNAIEPRSFSQNPPVLKRHQREITRTTLQSDQEEIDYDDTISVEMKKEDFDIYDEDENQSPRSFQKKTRHYFIAAVERLWDYGMSSSPHVLRNRAQSGSVPQFKKVVFQEFTDGSFTQPLYRGELNEHLGLLGPYIRAEVEDNIMVTFRNQASRPYSFYSSLISYEEDQRQGAEPRKNFVKPNETKTYFWKVQHHMAPTKDEFDCKAWAYFSDVDLEKDVHSGLIGPLLVCHTNTLNPAHGRQVTVQEFALFFTIFDETKSWYFTENMERNCRAPCNIQMEDPTFKENYRFHAINGYIMDTLPGLVMAQDQRIRWYLLSMGSNENIHSIHFSGHVFTVRKKEEYKMALYNLYPGVFETVEMLPSKAGIWRVECLIGEHLHAGMSTLFLVYSNKCQTPLGMASGHIRDFQITASGQYGQWAPKLARLHYSGSINAWSTKEPFSWIKVDLLAPMIIHGIKTQGARQKFSSLYISQFIIMYSLDGKKWQTYRGNSTGTLMVFFGNVDSSGIKHNIFNPPIIARYIRLHPTHYSIRSTLRMELMGCDLNSCSMPLGMESKAISDAQITASSYFTNMFATWSPSKARLHLQGRSNAWRPQVNNPKEWLQVDFQKTMKVTGVTTQGVKSLLTSMYVKEFLISSSQDGHQWTLFFQNGKVKVFQGNQDSFTPVVNSLDPPLLTRYLRIHPQSWVHQIALRMEVLGCEAQDLYGAGSPGAETAEQKLISEEDLSPATG

SEQ ID NO: 697 - DNA, 4575 bp, Artificial Sequence
  Description of Artificial Sequence: Synthetic polynucleotide
atgcaaatagagctctccacctgcttctttctgtgccttttgcgattctgctttagtgccaccagaggcgcgccaggttctcctgctggctcccccacctcaacagaagaggggacaagcgaaagcgctacgcctgagagtggccctggctctgagccagccacctccggctctgaaacccctgcctcgagcagatactacctgggtgcagtggaactgtcatgggactatatgcaaagtgatctcggtgagctgcctgtggacgcaagatttcctcctagagtgccaaaatcttttccattcaacacctcagtcgtgtacaaaaagactctgtttgtagaattcacggatcaccttttcaacatcgctaagccaaggccaccctggatgggtctgctaggtcctaccatccaggctgaggtttatgatacagtggtcattacacttaagaacatggcttcccatcctgtcagtcttcatgctgttggtgtatcctactggaaagcttctgagggagctgaatatgatgatcagaccagtcaaagggagaaagaagatgataaagtcttccctggtggaagccatacatatgtctggcaggtcctgaaagagaatggtccaatggcctctgacccactgtgccttacctactcatatctttctcatgtggacctggtaaaagacttgaattcaggcctcattggagccctactagtatgtagagaagggagtctggccaaggaaaagacacagaccttgcacaaatttatactactttttgctgtatttgatgaagggaaaagttggcactcagaaacaaagaactccttgatgcaggatagggatgctgcatctgctcgggcctggcctaaaatgcacacagtcaatggttatgtaaacaggtctctgccaggtctgattggatgccacaggaaatcagtctattggcatgtgattggaatgggcaccactcctgaagtgcactcaatattcctcgaaggtcacacatttcttgtgaggaaccatcgccaggctagcttggaaatctcgccaataactttccttactgctcaaacactcttgatggaccttggacagtttctactgttttgtcatatctcttcccaccaacatgatggcatggaagcttatgtcaaagtagacagctgtccagaggaaccccaactacgaatgaaaaataatgaagaagcggaagactatgatgatgatcttactgattctgaaatggatgtggtcaggtttgatgatgacaactctccttcctttatccaaattcgctcagttgccaagaagcatcctaaaacttgggtacattacattgctgctgaagaggaggactgggactatgctcccttagtcctcgcccccgatgacagaagttataaaagtcaatatttgaacaatggccctcagcggattggtaggaagtacaaaaaagtccgatttatggcatacacagatgaaacctttaagactcgtgaagctattcagcatgaatcaggaatcttgggacctttactttatggggaagttggagacacactgttgattatatttaagaatcaagcaagcagaccatataacatctaccctcacggaatcactgatgtccgtcctttgtattcaaggagattaccaaaaggtgtaaaacatttgaaggattttccaattctgccaggagaaatattcaaatataaatggacagtgactgtagaagatgggccaactaaatcagatcctcggtgcctgacccgctattactctagtttcgttaatatggagagagatctagcttcaggactcattggccctctcctcatctgctacaaagaatctgtagatcaaagaggaaaccagataatgtcagacaagaggaatgtcatcctgttttctgtatttgatgagaaccgaagctggtacctcacagagaatatacaacgctttctccccaatccagctggagtgcagcttgaggatccagagttccaagcctccaacatcatgcacagcatcaatggctatgtttttgatagtttgcagttgtcagtttgtttgcatgaggtggcatactggtacattctaagcattggagcacagactgacttcctttctgtcttcttctctggatataccttcaaacacaaaatggtctatgaagacacactcaccctattcccattctcaggagaaactgtcttcatgtcgatggaaaacccaggtctatggattctggggtgccacaactcagactttcggaacagaggcatgaccgccttactgaaggtttctagttgtgacaagaacactggtgattattacgaggacagttatgaagatatttcagcatacttgctgagtaaaaacaatgccattgaaccaagaagcttctctcaaaacccaccagtcttgaaacgccatcaacgggaaataactcgtactactcttcagtcagatcaagaggaaatcgattatgatgataccatatcagttgaaatgaagaaggaagattttgacatttatgatgaggatgaaaatcagagcccccgcagctttcaaaagaaaacacgacactattttattgctgcagtggagaggctctgggattatgggatgagtagctccccacatgttctaagaaacagggctcagagtggcagtgtccctcagttcaagaaagttgttttccaggaatttactgatggctcctttactcagcccttataccgtggagaactaaatgaacatttgggactcctggggccatatataagagcagaagttgaagataatatcatggtaactttcagaaatcaggcctctcgtccctattccttctattctagccttatttcttatgaggaagatcagaggcaaggagcagaacctagaaaaaactttgtcaagcctaatgaaaccaaaacttacttttggaaagtgcaacatcatatggcacccactaaagatgagtttgactgcaaagcctgggcttatttctctgatgttgacctggaaaaagatgtgcactcaggcctgattggaccccttctggtctgccacactaacacactgaaccctgctcatgggagacaagtgacagtacaggaatttgctctgtttttcaccatctttgatgagaccaaaagctggtacttcactgaaaatatggaaagaaactgcagggctccctgcaatatccagatggaagatcccacttttaaagagaattatcgcttccatgcaatcaatggctacataatggatacactacctggcttagtaatggctcaggatcaaaggattcgatggtatctgctcagcatgggcagcaatgaaaacatccattctattcatttcagtggacatgtgttcactgtacgaaaaaaagaggagtataaaatggcactgtacaatctctatccaggtgtttttgagacagtggaaatgttaccatccaaagctggaatttggcgggtggaatgccttattggcgagcatctacatgctgggatgagcacactttttctggtgtacagcaataagtgtcagactcccctgggaatggcttctggacacattagagattttcagattacagcttcaggacaatatggacagtgggccccaaagctggccagacttcattattccggatcaatcaatgcctggagcaccaaggagcccttttcttggatcaaggtggatctgttggcaccaatgattattcacggcatcaagacccagggtgcccgtcagaagttctccagcctctacatctctcagtttatcatcatgtatagtcttgatgggaagaagtggcagacttatcgaggaaattccactggaaccttaatggtcttctttggcaatgtggattcatctgggataaaacacaatatttttaaccctccaattattgctcgatacatccgtttgcacccaactcattatagcattcgcagcactcttcgcatggagttgatgggctgtgatttaaatagttgcagcatgccattgggaatggagagtaaagcaatatcagatgcacagattactgcttcatcctactttaccaatatgtttgccacctggtctccttcaaaagctcgacttcacctccaagggaggagtaatgcctggagacctcaggtgaataatccaaaagagtggctgcaagtggacttccagaagacaatgaaagtcacaggagtaactactcagggagtaaaatctctgcttaccagcatgtatgtgaaggagttcctcatctccagcagtcaagatggccatcagtggactctcttttttcagaatggcaaagtaaaggtttttcagggaaatcaagactccttcacacctgtggtgaactctctagacccaccgttactgactcgctaccttcgaattcacccccagagttgggtgcaccagattgccctgaggatggaggttctgggctgcgaggcacaggacctctacggcgccggatcacctggggccgaaacggccgaacaaaaactcatctcagaagaggatctgtcacctgcaaccggttga

SEQ ID NO: 698 - protein, 1527 aa, Artificial Sequence
  Description of Artificial Sequence: Synthetic polypeptide
MQIELSTCFFLCLLRFCFSATRGAPGSPAGSPTSTEEGTSESATPESGPGSEPATSGSETPASSATRRYYLGAVELSWDYMQSDLGELPVDARFPPRVPKSFPFNTSVVYKKTLFVEFTDHLFNIAKPRPPWMGLLGPTIQAEVYDTVVITLKNMASHPVSLHAVGVSYWKASEGAEYDDQTSQREKEDDKVFPGGSHTYVWQVLKENGPMASDPLCLTYSYLSHVDLVKDLNSGLIGALLVCREGSLAKEKTQTLHKFILLFAVFDEGKSWHSETKNSLMQDRDAASARAWPKMHTVNGYVNRSLPGLIGCHRKSVYWHVIGMGTTPEVHSIFLEGHTFLVRNHRQASLEISPITFLTAQTLLMDLGQFLLFCHISSHQHDGMEAYVKVDSCPEEPQLRMKNNEEAEDYDDDLTDSEMDVVRFDDDNSPSFIQIRSVAKKHPKTWVHYIAAEEEDWDYAPLVLAPDDRSYKSQYLNNGPQRIGRKYKKVRFMAYTDETFKTREAIQHESGILGPLLYGEVGDTLLIIFKNQASRPYNIYPHGITDVRPLYSRRLPKGVKHLKDFPILPGEIFKYKWTVTVEDGPTKSDPRCLTRYYSSFVNMERDLASGLIGPLLICYKESVDQRGNQIMSDKRNVILFSVFDENRSWYLTENIQRFLPNPAGVQLEDPEFQASNIMHSINGYVFDSLQLSVCLHEVAYWYILSIGAQTDFLSVFFSGYTFKHKMVYEDTLTLFPFSGETVFMSMENPGLWILGCHNSDFRNRGMTALLKVSSCDKNTGDYYEDSYEDISAYLLSKNNAIEPRSFSQNPPVLKRHQREITRTTLQSDQEEIDYDDTISVEMKKEDFDIYDEDENQSPRSFQKKTRHYFIAAVERLWDYGMSSSPHVLRNRAQSGSVPQFKKVVFQEFTDGSFTQPLYRGELNEHLGLLGPYIRAEVEDNIMVTFRNQASRPYSFYSSLISYEEDQRQGAEPRKNFVKPNETKTYFWKVQHHMAPTKDEFDCKAWAYFSDVDLEKDVHSGLIGPLLVCHTNTLNPAHGRQVTVQEFALFFTIFDETKSWYFTENMERNCRAPCNIQMEDPTFKENYRFHAINGYIMDTLPGLVMAQDQRIRWYLLSMGSNENIHSIHFSGHVFTVRKKEEYKMALYNLYPGVFETVEMLPSKAGIWRVECLIGEHLHAGMSTLFLVYSNKCQTPLGMASGHIRDFQITASGQYGQWAPKLARLHYSGSINAWSTKEPFSWIKVDLLAPMIIHGIKTQGARQKFSSLYISQFIIMYSLDGKKWQTYRGNSTGTLMVFFGNVDSSGIKHNIFNPPIIARYIRLHPTHYSIRSTLRMELMGCDLNSCSMPLGMESKAISDAQITASSYFTNMFATWSPSKARLHLQGRSNAWRPQVNNPKEWLQVDFQKTMKVTGVTTQGVKSLLTSMYVKEFLISSSQDGHQWTLFFQNGKVKVFQGNQDSFTPVVNSLDPPLLTRYLRIHPQSWVHQIALRMEVLGCEAQDLYGAGSPGAETAEQKLISEEDLSPATG

SEQ ID NO: 699 - DNA, 4584 bp, Artificial Sequence
  Description of Artificial Sequence: Synthetic polynucleotide
atgcaaatagagctctccacctgcttctttctgtgccttttgcgattctgctttagtgccaccagaggcgcgccaggttctcctgctggctcccccacctcaacagaagaggggacaagcgaaagcgctacgcctgagagtggccctggctctgagccagccacctccggctctgaaacccctgcctcgagcgctacaagaagatactacctgggtgcagtggaactgtcatgggactatatgcaaagtgatctcggtgagctgcctgtggacgcaagatttcctcctagagtgccaaaatcttttccattcaacacctcagtcgtgtacaaaaagactctgtttgtagaattcacggatcaccttttcaacatcgctaagccaaggccaccctggatgggtctgctaggtcctaccatccaggctgaggtttatgatacagtggtcattacacttaagaacatggcttcccatcctgtcagtcttcatgctgttggtgtatcctactggaaagcttctgagggagctgaatatgatgatcagaccagtcaaagggagaaagaagatgataaagtcttccctggtggaagccatacatatgtctggcaggtcctgaaagagaatggtccaatggcctctgacccactgtgccttacctactcatatctttctcatgtggacctggtaaaagacttgaattcaggcctcattggagccctactagtatgtagagaagggagtctggccaaggaaaagacacagaccttgcacaaatttatactactttttgctgtatttgatgaagggaaaagttggcactcagaaacaaagaactccttgatgcaggatagggatgctgcatctgctcgggcctggcctaaaatgcacacagtcaatggttatgtaaacaggtctctgccaggtctgattggatgccacaggaaatcagtctattggcatgtgattggaatgggcaccactcctgaagtgcactcaatattcctcgaaggtcacacatttcttgtgaggaaccatcgccaggctagcttggaaatctcgccaataactttccttactgctcaaacactcttgatggaccttggacagtttctactgttttgtcatatctcttcccaccaacatgatggcatggaagcttatgtcaaagtagacagctgtccagaggaaccccaactacgaatgaaaaataatgaagaagcggaagactatgatgatgatcttactgattctgaaatggatgtggtcaggtttgatgatgacaactctccttcctttatccaaattcgctcagttgccaagaagcatcctaaaacttgggtacattacattgctgctgaagaggaggactgggactatgctcccttagtcctcgcccccgatgacagaagttataaaagtcaatatttgaacaatggccctcagcggattggtaggaagtacaaaaaagtccgatttatggcatacacagatgaaacctttaagactcgtgaagctattcagcatgaatcaggaatcttgggacctttactttatggggaagttggagacacactgttgattatatttaagaatcaagcaagcagaccatataacatctaccctcacggaatcactgatgtccgtcctttgtattcaaggagattaccaaaaggtgtaaaacatttgaaggattttccaattctgccaggagaaatattcaaatataaatggacagtgactgtagaagatgggccaactaaatcagatcctcggtgcctgacccgctattactctagtttcgttaatatggagagagatctagcttcaggactcattggccctctcctcatctgctacaaagaatctgtagatcaaagaggaaaccagataatgtcagacaagaggaatgtcatcctgttttctgtatttgatgagaaccgaagctggtacctcacagagaatatacaacgctttctccccaatccagctggagtgcagcttgaggatccagagttccaagcctccaacatcatgcacagcatcaatggctatgtttttgatagtttgcagttgtcagtttgtttgcatgaggtggcatactggtacattctaagcattggagcacagactgacttcctttctgtcttcttctctggatataccttcaaacacaaaatggtctatgaagacacactcaccctattcccattctcaggagaaactgtcttcatgtcgatggaaaacccaggtctatggattctggggtgccacaactcagactttcggaacagaggcatgaccgccttactgaaggtttctagttgtgacaagaacactggtgattattacgaggacagttatgaagatatttcagcatacttgctgagtaaaaacaatgccattgaaccaagaagcttctctcaaaacccaccagtcttgaaacgccatcaacgggaaataactcgtactactcttcagtcagatcaagaggaaatcgattatgatgataccatatcagttgaaatgaagaaggaagattttgacatttatgatgaggatgaaaatcagagcccccgcagctttcaaaagaaaacacgacactattttattgctgcagtggagaggctctgggattatgggatgagtagctccccacatgttctaagaaacagggctcagagtggcagtgtccctcagttcaagaaagttgttttccaggaatttactgatggctcctttactcagcccttataccgtggagaactaaatgaacatttgggactcctggggccatatataagagcagaagttgaagataatatcatggtaactttcagaaatcaggcctctcgtccctattccttctattctagccttatttcttatgaggaagatcagaggcaaggagcagaacctagaaaaaactttgtcaagcctaatgaaaccaaaacttacttttggaaagtgcaacatcatatggcacccactaaagatgagtttgactgcaaagcctgggcttatttctctgatgttgacctggaaaaagatgtgcactcaggcctgattggaccccttctggtctgccacactaacacactgaaccctgctcatgggagacaagtgacagtacaggaatttgctctgtttttcaccatctttgatgagaccaaaagctggtacttcactgaaaatatggaaagaaactgcagggctccctgcaatatccagatggaagatcccacttttaaagagaattatcgcttccatgcaatcaatggctacataatggatacactacctggcttagtaatggctcaggatcaaaggattcgatggtatctgctcagcatgggcagcaatgaaaacatccattctattcatttcagtggacatgtgttcactgtacgaaaaaaagaggagtataaaatggcactgtacaatctctatccaggtgtttttgagacagtggaaatgttaccatccaaagctggaatttggcgggtggaatgccttattggcgagcatctacatgctgggatgagcacactttttctggtgtacagcaataagtgtcagactcccctgggaatggcttctggacacattagagattttcagattacagcttcaggacaatatggacagtgggccccaaagctggccagacttcattattccggatcaatcaatgcctggagcaccaaggagcccttttcttggatcaaggtggatctgttggcaccaatgattattcacggcatcaagacccagggtgcccgtcagaagttctccagcctctacatctctcagtttatcatcatgtatagtcttgatgggaagaagtggcagacttatcgaggaaattccactggaaccttaatggtcttctttggcaatgtggattcatctgggataaaacacaatatttttaaccctccaattattgctcgatacatccgtttgcacccaactcattatagcattcgcagcactcttcgcatggagttgatgggctgtgatttaaatagttgcagcatgccattgggaatggagagtaaagcaatatcagatgcacagattactgcttcatcctactttaccaatatgtttgccacctggtctccttcaaaagctcgacttcacctccaagggaggagtaatgcctggagacctcaggtgaataatccaaaagagtggctgcaagtggacttccagaagacaatgaaagtcacaggagtaactactcagggagtaaaatctctgcttaccagcatgtatgtgaaggagttcctcatctccagcagtcaagatggccatcagtggactctcttttttcagaatggcaaagtaaaggtttttcagggaaatcaagactccttcacacctgtggtgaactctctagacccaccgttactgactcgctaccttcgaattcacccccagagttgggtgcaccagattgccctgaggatggaggttctgggctgcgaggcacaggacctctacggcgccggatcacctggggccgaaacggccgaacaaaaactcatctcagaagaggatctgtcacctgcaaccggttga

SEQ ID NO: 700 - protein, 1524 aa, Artificial Sequence
  Description of Artificial Sequence: Synthetic polypeptide
MQIELSTCFFLCLLRFCFSATRRYYLGAVELSWDYMQGAPGSPAGSPTSTEEGTSESATPESGPGSEPATSGSETPASSSDLGELPVDARFPPRVPKSFPFNTSVVYKKTLFVEFTDHLFNIAKPRPPWMGLLGPTIQAEVYDTVVITLKNMASHPVSLHAVGVSYWKASEGAEYDDQTSQREKEDDKVFPGGSHTYVWQVLKENGPMASDPLCLTYSYLSHVDLVKDLNSGLIGALLVCREGSLAKEKTQTLHKFILLFAVFDEGKSWHSETKNSLMQDRDAASARAWPKMHTVNGYVNRSLPGLIGCHRKSVYWHVIGMGTTPEVHSIFLEGHTFLVRNHRQASLEISPITFLTAQTLLMDLGQFLLFCHISSHQHDGMEAYVKVDSCPEEPQLRMKNNEEAEDYDDDLTDSEMDVVRFDDDNSPSFIQIRSVAKKHPKTWVHYIAAEEEDWDYAPLVLAPDDRSYKSQYLNNGPQRIGRKYKKVRFMAYTDETFKTREAIQHESGILGPLLYGEVGDTLLIIFKNQASRPYNIYPHGITDVRPLYSRRLPKGVKHLKDFPILPGEIFKYKWTVTVEDGPTKSDPRCLTRYYSSFVNMERDLASGLIGPLLICYKESVDQRGNQIMSDKRNVILFSVFDENRSWYLTENIQRFLPNPAGVQLEDPEFQASNIMHSINGYVFDSLQLSVCLHEVAYWYILSIGAQTDFLSVFFSGYTFKHKMVYEDTLTLFPFSGETVFMSMENPGLWILGCHNSDFRNRGMTALLKVSSCDKNTGDYYEDSYEDISAYLLSKNNAIEPRSFSQNPPVLKRHQREITRTTLQSDQEEIDYDDTISVEMKKEDFDIYDEDENQSPRSFQKKTRHYFIAAVERLWDYGMSSSPHVLRNRAQSGSVPQFKKVVFQEFTDGSFTQPLYRGELNEHLGLLGPYIRAEVEDNIMVTFRNQASRPYSFYSSLISYEEDQRQGAEPRKNFVKPNETKTYFWKVQHHMAPTKDEFDCKAWAYFSDVDLEKDVHSGLIGPLLVCHTNTLNPAHGRQVTVQEFALFFTIFDETKSWYFTENMERNCRAPCNIQMEDPTFKENYRFHAINGYIMDTLPGLVMAQDQRIRWYLLSMGSNENIHSIHFSGHVFTVRKKEEYKMALYNLYPGVFETVEMLPSKAGIWRVECLIGEHLHAGMSTLFLVYSNKCQTPLGMASGHIRDFQITASGQYGQWAPKLARLHYSGSINAWSTKEPFSWIKVDLLAPMIIHGIKTQGARQKFSSLYISQFIIMYSLDGKKWQTYRGNSTGTLMVFFGNVDSSGIKHNIFNPPIIARYIRLHPTHYSIRSTLRMELMGCDLNSCSMPLGMESKAISDAQITASSYFTNMFATWSPSKARLHLQGRSNAWRPQVNNPKEWLQVDFQKTMKVTGVTTQGVKSLLTSMYVKEFLISSSQDGHQWTLFFQNGKVKVFQGNQDSFTPVVNSLDPPLLTRYLRIHPQSWVHQIALRMEVLGCEAQDLYGAGSPGAETAEQKLISEEDLSPATG

SEQ ID NO: 701 - DNA, 4575 bp, Artificial Sequence
  Description of Artificial Sequence: Synthetic polynucleotide
atgcaaatagagctctccacctgcttctttctgtgccttttgcgattctgctttagtgccaccagaagatactacctgggtgcagtggaactgtcatgggactatatgcaaggcgcgccaggttctcctgctggctcccccacctcaacagaagaggggacaagcgaaagcgctacgcctgagagtggccctggctctgagccagccacctccggctctgaaacccctgcctcgagcagtgatctcggtgagctgcctgtggacgcaagatttcctcctagagtgccaaaatcttttccattcaacacctcagtcgtgtacaaaaagactctgtttgtagaattcacggatcaccttttcaacatcgctaagccaaggccaccctggatgggtctgctaggtcctaccatccaggctgaggtttatgatacagtggtcattacacttaagaacatggcttcccatcctgtcagtcttcatgctgttggtgtatcctactggaaagcttctgagggagctgaatatgatgatcagaccagtcaaagggagaaagaagatgataaagtcttccctggtggaagccatacatatgtctggcaggtcctgaaagagaatggtccaatggcctctgacccactgtgccttacctactcatatctttctcatgtggacctggtaaaagacttgaattcaggcctcattggagccctactagtatgtagagaagggagtctggccaaggaaaagacacagaccttgcacaaatttatactactttttgctgtatttgatgaagggaaaagttggcactcagaaacaaagaactccttgatgcaggatagggatgctgcatctgctcgggcctggcctaaaatgcacacagtcaatggttatgtaaacaggtctctgccaggtctgattggatgccacaggaaatcagtctattggcatgtgattggaatgggcaccactcctgaagtgcactcaatattcctcgaaggtcacacatttcttgtgaggaaccatcgccaggctagcttggaaatctcgccaataactttccttactgctcaaacactcttgatggaccttggacagtttctactgttttgtcatatctcttcccaccaacatgatggcatggaagcttatgtcaaagtagacagctgtccagaggaaccccaactacgaatgaaaaataatgaagaagcggaagactatgatgatgatcttactgattctgaaatggatgtggtcaggtttgatgatgacaactctccttcctttatccaaattcgctcagttgccaagaagcatcctaaaacttgggtacattacattgctgctgaagaggaggactgggactatgctcccttagtcctcgcccccgatgacagaagttataaaagtcaatatttgaacaatggccctcagcggattggtaggaagtacaaaaaagtccgatttatggcatacacagatgaaacctttaagactcgtgaagctattcagcatgaatcaggaatcttgggacctttactttatggggaagttggagacacactgttgattatatttaagaatcaagcaagcagaccatataacatctaccctcacggaatcactgatgtccgtcctttgtattcaaggagattaccaaaaggtgtaaaacatttgaaggattttccaattctgccaggagaaatattcaaatataaatggacagtgactgtagaagatgggccaactaaatcagatcctcggtgcctgacccgctattactctagtttcgttaatatggagagagatctagcttcaggactcattggccctctcctcatctgctacaaagaatctgtagatcaaagaggaaaccagataatgtcagacaagaggaatgtcatcctgttttctgtatttgatgagaaccgaagctggtacctcacagagaatatacaacgctttctccccaatccagctggagtgcagcttgaggatccagagttccaagcctccaacatcatgcacagcatcaatggctatgtttttgatagtttgcagttgtcagtttgtttgcatgaggtggcatactggtacattctaagcattggagcacagactgacttcctttctgtcttcttctctggatataccttcaaacacaaaatggtctatgaagacacactcaccctattcccattctcaggagaaactgtcttcatgtcgatggaaaacccaggtctatggattctggggtgccacaactcagactttcggaacagaggcatgaccgccttactgaaggtttctagttgtgacaagaacactggtgattattacgaggacagttatgaagatatttcagcatacttgctgagtaaaaacaatgccattgaaccaagaagcttctctcaaaacccaccagtcttgaaacgccatcaacgggaaataactcgtactactcttcagtcagatcaagaggaaatcgattatgatgataccatatcagttgaaatgaagaaggaagattttgacatttatgatgaggatgaaaatcagagcccccgcagctttcaaaagaaaacacgacactattttattgctgcagtggagaggctctgggattatgggatgagtagctccccacatgttctaagaaacagggctcagagtggcagtgtccctcagttcaagaaagttgttttccaggaatttactgatggctcctttactcagcccttataccgtggagaactaaatgaacatttgggactcctggggccatatataagagcagaagttgaagataatatcatggtaactttcagaaatcaggcctctcgtccctattccttctattctagccttatttcttatgaggaagatcagaggcaaggagcagaacctagaaaaaactttgtcaagcctaatgaaaccaaaacttacttttggaaagtgcaacatcatatggcacccactaaagatgagtttgactgcaaagcctgggcttatttctctgatgttgacctggaaaaagatgtgcactcaggcctgattggaccccttctggtctgccacactaacacactgaaccctgctcatgggagacaagtgacagtacaggaatttgctctgtttttcaccatctttgatgagaccaaaagctggtacttcactgaaaatatggaaagaaactgcagggctccctgcaatatccagatggaagatcccacttttaaagagaattatcgcttccatgcaatcaatggctacataatggatacactacctggcttagtaatggctcaggatcaaaggattcgatggtatctgctcagcatgggcagcaatgaaaacatccattctattcatttcagtggacatgtgttcactgtacgaaaaaaagaggagtataaaatggcactgtacaatctctatccaggtgtttttgagacagtggaaatgttaccatccaaagctggaatttggcgggtggaatgccttattggcgagcatctacatgctgggatgagcacactttttctggtgtacagcaataagtgtcagactcccctgggaatggcttctggacacattagagattttcagattacagcttcaggacaatatggacagtgggccccaaagctggccagacttcattattccggatcaatcaatgcctggagcaccaaggagcccttttcttggatcaaggtggatctgttggcaccaatgattattcacggcatcaagacccagggtgcccgtcagaagttctccagcctctacatctctcagtttatcatcatgtatagtcttgatgggaagaagtggcagacttatcgaggaaattccactggaaccttaatggtcttctttggcaatgtggattcatctgggataaaacacaatatttttaaccctccaattattgctcgatacatccgtttgcacccaactcattatagcattcgcagcactcttcgcatggagttgatgggctgtgatttaaatagttgcagcatgccattgggaatggagagtaaagcaatatcagatgcacagattactgcttcatcctactttaccaatatgtttgccacctggtctccttcaaaagctcgacttcacctccaagggaggagtaatgcctggagacctcaggtgaataatccaaaagagtggctgcaagtggacttccagaagacaatgaaagtcacaggagtaactactcagggagtaaaatctctgcttaccagcatgtatgtgaaggagttcctcatctccagcagtcaagatggccatcagtggactctcttttttcagaatggcaaagtaaaggtttttcagggaaatcaagactccttcacacctgtggtgaactctctagacccaccgttactgactcgctaccttcgaattcacccccagagttgggtgcaccagattgccctgaggatggaggttctgggctgcgaggcacaggacctctacggcgccggatcacctggggccgaaacggccgaacaaaaactcatctcagaagaggatctgtcacctgcaaccggttga

SEQ ID NO: 702 - protein, 1524 aa, Artificial Sequence
  Description of Artificial Sequence: Synthetic polypeptide
MQIELSTCFFLCLLRFCFSATRRYYLGAVELSWDYMQSDLGGAPGSPAGSPTSTEEGTSESATPESGPGSEPATSGSETPASSELPVDARFPPRVPKSFPFNTSVVYKKTLFVEFTDHLFNIAKPRPPWMGLLGPTIQAEVYDTVVITLKNMASHPVSLHAVGVSYWKASEGAEYDDQTSQREKEDDKVFPGGSHTYVWQVLKENGPMASDPLCLTYSYLSHVDLVKDLNSGLIGALLVCREGSLAKEKTQTLHKFILLFAVFDEGKSWHSETKNSLMQDRDAASARAWPKMHTVNGYVNRSLPGLIGCHRKSVYWHVIGMGTTPEVHSIFLEGHTFLVRNHRQASLEISPITFLTAQTLLMDLGQFLLFCHISSHQHDGMEAYVKVDSCPEEPQLRMKNNEEAEDYDDDLTDSEMDVVRFDDDNSPSFIQIRSVAKKHPKTWVHYIAAEEEDWDYAPLVLAPDDRSYKSQYLNNGPQRIGRKYKKVRFMAYTDETFKTREAIQHESGILGPLLYGEVGDTLLIIFKNQASRPYNIYPHGITDVRPLYSRRLPKGVKHLKDFPILPGEIFKYKWTVTVEDGPTKSDPRCLTRYYSSFVNMERDLASGLIGPLLICYKESVDQRGNQIMSDKRNVILFSVFDENRSWYLTENIQRFLPNPAGVQLEDPEFQASNIMHSINGYVFDSLQLSVCLHEVAYWYILSIGAQTDFLSVFFSGYTFKHKMVYEDTLTLFPFSGETVFMSMENPGLWILGCHNSDFRNRGMTALLKVSSCDKNTGDYYEDSYEDISAYLLSKNNAIEPRSFSQNPPVLKRHQREITRTTLQSDQEEIDYDDTISVEMKKEDFDIYDEDENQSPRSFQKKTRHYFIAAVERLWDYGMSSSPHVLRNRAQSGSVPQFKKVVFQEFTDGSFTQPLYRGELNEHLGLLGPYIRAEVEDNIMVTFRNQASRPYSFYSSLISYEEDQRQGAEPRKNFVKPNETKTYFWKVQHHMAPTKDEFDCKAWAYFSDVDLEKDVHSGLIGPLLVCHTNTLNPAHGRQVTVQEFALFFTIFDETKSWYFTENMERNCRAPCNIQMEDPTFKENYRFHAINGYIMDTLPGLVMAQDQRIRWYLLSMGSNENIHSIHFSGHVFTVRKKEEYKMALYNLYPGVFETVEMLPSKAGIWRVECLIGEHLHAGMSTLFLVYSNKCQTPLGMASGHIRDFQITASGQYGQWAPKLARLHYSGSINAWSTKEPFSWIKVDLLAPMIIHGIKTQGARQKFSSLYISQFIIMYSLDGKKWQTYRGNSTGTLMVFFGNVDSSGIKHNIFNPPIIARYIRLHPTHYSIRSTLRMELMGCDLNSCSMPLGMESKAISDAQITASSYFTNMFATWSPSKARLHLQGRSNAWRPQVNNPKEWLQVDFQKTMKVTGVTTQGVKSLLTSMYVKEFLISSSQDGHQWTLFFQNGKVKVFQGNQDSFTPVVNSLDPPLLTRYLRIHPQSWVHQIALRMEVLGCEAQDLYGAGSPGAETAEQKLISEEDLSPATG

SEQ ID NO: 703 - DNA, 4575 bp, Artificial Sequence
  Description of Artificial Sequence: Synthetic polynucleotide
atgcaaatagagctctccacctgcttctttctgtgccttttgcgattctgctttagtgccaccagaagatactacctgggtgcagtggaactgtcatgggactatatgcaaagtgatctcggtggcgcgccaggttctcctgctggctcccccacctcaacagaagaggggacaagcgaaagcgctacgcctgagagtggccctggctctgagccagccacctccggctctgaaacccctgcctcgagcgagctgcctgtggacgcaagatttcctcctagagtgccaaaatcttttccattcaacacctcagtcgtgtacaaaaagactctgtttgtagaattcacggatcaccttttcaacatcgctaagccaaggccaccctggatgggtctgctaggtcctaccatccaggctgaggtttatgatacagtggtcattacacttaagaacatggcttcccatcctgtcagtcttcatgctgttggtgtatcctactggaaagcttctgagggagctgaatatgatgatcagaccagtcaaagggagaaagaagatgataaagtcttccctggtggaagccatacatatgtctggcaggtcctgaaagagaatggtccaatggcctctgacccactgtgccttacctactcatatctttctcatgtggacctggtaaaagacttgaattcaggcctcattggagccctactagtatgtagagaagggagtctggccaaggaaaagacacagaccttgcacaaatttatactactttttgctgtatttgatgaagggaaaagttggcactcagaaacaaagaactccttgatgcaggatagggatgctgcatctgctcgggcctggcctaaaatgcacacagtcaatggttatgtaaacaggtctctgccaggtctgattggatgccacaggaaatcagtctattggcatgtgattggaatgggcaccactcctgaagtgcactcaatattcctcgaaggtcacacatttcttgtgaggaaccatcgccaggctagcttggaaatctcgccaataactttccttactgctcaaacactcttgatggaccttggacagtttctactgttttgtcatatctcttcccaccaacatgatggcatggaagcttatgtcaaagtagacagctgtccagaggaaccccaactacgaatgaaaaataatgaagaagcggaagactatgatgatgatcttactgattctgaaatggatgtggtcaggtttgatgatgacaactctccttcctttatccaaattcgctcagttgccaagaagcatcctaaaacttgggtacattacattgctgctgaagaggaggactgggactatgctcccttagtcctcgcccccgatgacagaagttataaaagtcaatatttgaacaatggccctcagcggattggtaggaagtacaaaaaagtccgatttatggcatacacagatgaaacctttaagactcgtgaagctattcagcatgaatcaggaatcttgggacctttactttatggggaagttggagacacactgttgattatatttaagaatcaagcaagcagaccatataacatctaccctcacggaatcactgatgtccgtcctttgtattcaaggagattaccaaaaggtgtaaaacatttgaaggattttccaattctgccaggagaaatattcaaatataaatggacagtgactgtagaagatgggccaactaaatcagatcctcggtgcctgacccgctattactctagtttcgttaatatggagagagatctagcttcaggactcattggccctctcctcatctgctacaaagaatctgtagatcaaagaggaaaccagataatgtcagacaagaggaatgtcatcctgttttctgtatttgatgagaaccgaagctggtacctcacagagaatatacaacgctttctccccaatccagctggagtgcagcttgaggatccagagttccaagcctccaacatcatgcacagcatcaatggctatgtttttgatagtttgcagttgtcagtttgtttgcatgaggtggcatactggtacattctaagcattggagcacagactgacttcctttctgtcttcttctctggatataccttcaaacacaaaatggtctatgaagacacactcaccctattcccattctcaggagaaactgtcttcatgtcgatggaaaacccaggtctatggattctggggtgccacaactcagactttcggaacagaggcatgaccgccttactgaaggtttctagttgtgacaagaacactggtgattattacgaggacagttatgaagatatttcagcatacttgctgagtaaaaacaatgccattgaaccaagaagcttctctcaaaacccaccagtcttgaaacgccatcaacgggaaataactcgtactactcttcagtcagatcaagaggaaatcgattatgatgataccatatcagttgaaatgaagaaggaagattttgacatttatgatgaggatgaaaatcagagcccccgcagctttcaaaagaaaacacgacactattttattgctgcagtggagaggctctgggattatgggatgagtagctccccacatgttctaagaaacagggctcagagtggcagtgtccctcagttcaagaaagttgttttccaggaatttactgatggctcctttactcagcccttataccgtggagaactaaatgaacatttgggactcctggggccatatataagagcagaagttgaagataatatcatggtaactttcagaaatcaggcctctcgtccctattccttctattctagccttatttcttatgaggaagatcagaggcaaggagcagaacctagaaaaaactttgtcaagcctaatgaaaccaaaacttacttttggaaagtgcaacatcatatggcacccactaaagatgagtttgactgcaaagcctgggcttatttctctgatgttgacctggaaaaagatgtgcactcaggcctgattggaccccttctggtctgccacactaacacactgaaccctgctcatgggagacaagtgacagtacaggaatttgctctgtttttcaccatctttgatgagaccaaaagctggtacttcactgaaaatatggaaagaaactgcagggctccctgcaatatccagatggaagatcccacttttaaagagaattatcgcttccatgcaatcaatggctacataatggatacactacctggcttagtaatggctcaggatcaaaggattcgatggtatctgctcagcatgggcagcaatgaaaacatccattctattcatttcagtggacatgtgttcactgtacgaaaaaaagaggagtataaaatggcactgtacaatctctatccaggtgtttttgagacagtggaaatgttaccatccaaagctggaatttggcgggtggaatgccttattggcgagcatctacatgctgggatgagcacactttttctggtgtacagcaataagtgtcagactcccctgggaatggcttctggacacattagagattttcagattacagcttcaggacaatatggacagtgggccccaaagctggccagacttcattattccggatcaatcaatgcctggagcaccaaggagcccttttcttggatcaaggtggatctgttggcaccaatgattattcacggcatcaagacccagggtgcccgtcagaagttctccagcctctacatctctcagtttatcatcatgtatagtcttgatgggaagaagtggcagacttatcgaggaaattccactggaaccttaatggtcttctttggcaatgtggattcatctgggataaaacacaatatttttaaccctccaattattgctcgatacatccgtttgcacccaactcattatagcattcgcagcactcttcgcatggagttgatgggctgtgatttaaatagttgcagcatgccattgggaatggagagtaaagcaatatcagatgcacagattactgcttcatcctactttaccaatatgtttgccacctggtctccttcaaaagctcgacttcacctccaagggaggagtaatgcctggagacctcaggtgaataatccaaaagagtggctgcaagtggacttccagaagacaatgaaagtcacaggagtaactactcagggagtaaaatctctgcttaccagcatgtatgtgaaggagttcctcatctccagcagtcaagatggccatcagtggactctcttttttcagaatggcaaagtaaaggtttttcagggaaatcaagactccttcacacctgtggtgaactctctagacccaccgttactgactcgctaccttcgaattcacccccagagttgggtgcaccagattgccctgaggatggaggttctgggctgcgaggcacaggacctctacggcgccggatcacctggggccgaaacggccgaacaaaaactcatctcagaagaggatctgtcacctgcaaccggttga

SEQ ID NO: 704 - protein, 1524 aa, Artificial Sequence
  Description of Artificial Sequence: Synthetic polypeptide
MQIELSTCFFLCLLRFCFSATRRYYLGAVELSWDYMQSDLGELPVGAPGSPAGSPTSTEEGTSESATPESGPGSEPATSGSETPASSDARFPPRVPKSFPFNTSVVYKKTLFVEFTDHLFNIAKPRPPWMGLLGPTIQAEVYDTVVITLKNMASHPVSLHAVGVSYWKASEGAEYDDQTSQREKEDDKVFPGGSHTYVWQVLKENGPMASDPLCLTYSYLSHVDLVKDLNSGLIGALLVCREGSLAKEKTQTLHKFILLFAVFDEGKSWHSETKNSLMQDRDAASARAWPKMHTVNGYVNRSLPGLIGCHRKSVYWHVIGMGTTPEVHSIFLEGHTFLVRNHRQASLEISPITFLTAQTLLMDLGQFLLFCHISSHQHDGMEAYVKVDSCPEEPQLRMKNNEEAEDYDDDLTDSEMDVVRFDDDNSPSFIQIRSVAKKHPKTWVHYIAAEEEDWDYAPLVLAPDDRSYKSQYLNNGPQRIGRKYKKVRFMAYTDETFKTREAIQHESGILGPLLYGEVGDTLLIIFKNQASRPYNIYPHGITDVRPLYSRRLPKGVKHLKDFPILPGEIFKYKWTVTVEDGPTKSDPRCLTRYYSSFVNMERDLASGLIGPLLICYKESVDQRGNQIMSDKRNVILFSVFDENRSWYLTENIQRFLPNPAGVQLEDPEFQASNIMHSINGYVFDSLQLSVCLHEVAYWYILSIGAQTDFLSVFFSGYTFKHKMVYEDTLTLFPFSGETVFMSMENPGLWILGCHNSDFRNRGMTALLKVSSCDKNTGDYYEDSYEDISAYLLSKNNAIEPRSFSQNPPVLKRHQREITRTTLQSDQEEIDYDDTISVEMKKEDFDIYDEDENQSPRSFQKKTRHYFIAAVERLWDYGMSSSPHVLRNRAQSGSVPQFKKVVFQEFTDGSFTQPLYRGELNEHLGLLGPYIRAEVEDNIMVTFRNQASRPYSFYSSLISYEEDQRQGAEPRKNFVKPNETKTYFWKVQHHMAPTKDEFDCKAWAYFSDVDLEKDVHSGLIGPLLVCHTNTLNPAHGRQVTVQEFALFFTIFDETKSWYFTENMERNCRAPCNIQMEDPTFKENYRFHAINGYIMDTLPGLVMAQDQRIRWYLLSMGSNENIHSIHFSGHVFTVRKKEEYKMALYNLYPGVFETVEMLPSKAGIWRVECLIGEHLHAGMSTLFLVYSNKCQTPLGMASGHIRDFQITASGQYGQWAPKLARLHYSGSINAWSTKEPFSWIKVDLLAPMIIHGIKTQGARQKFSSLYISQFIIMYSLDGKKWQTYRGNSTGTLMVFFGNVDSSGIKHNIFNPPIIARYIRLHPTHYSIRSTLRMELMGCDLNSCSMPLGMESKAISDAQITASSYFTNMFATWSPSKARLHLQGRSNAWRPQVNNPKEWLQVDFQKTMKVTGVTTQGVKSLLTSMYVKEFLISSSQDGHQWTLFFQNGKVKVFQGNQDSFTPVVNSLDPPLLTRYLRIHPQSWVHQIALRMEVLGCEAQDLYGAGSPGAETAEQKLISEEDLSPATG

SEQ ID NO: 705 - DNA, 4575 bp, Artificial Sequence
  Description of Artificial Sequence: Synthetic polynucleotide
atgcaaatagagctctccacctgcttctttctgtgccttttgcgattctgctttagtgccaccagaagatactacctgggtgcagtggaactgtcatgggactatatgcaaagtgatctcggtgagctgcctgtgggcgcgccaggttctcctgctggctcccccacctcaacagaagaggggacaagcgaaagcgctacgcctgagagtggccctggctctgagccagccacctccggctctgaaacccctgcctcgagcgacgcaagatttcctcctagagtgccaaaatcttttccattcaacacctcagtcgtgtacaaaaagactctgtttgtagaattcacggatcaccttttcaacatcgctaagccaaggccaccctggatgggtctgctaggtcctaccatccaggctgaggtttatgatacagtggtcattacacttaagaacatggcttcccatcctgtcagtcttcatgctgttggtgtatcctactggaaagcttctgagggagctgaatatgatgatcagaccagtcaaagggagaaagaagatgataaagtcttccctggtggaagccatacatatgtctggcaggtcctgaaagagaatggtccaatggcctctgacccactgtgccttacctactcatatctttctcatgtggacctggtaaaagacttgaattcaggcctcattggagccctactagtatgtagagaagggagtctggccaaggaaaagacacagaccttgcacaaatttatactactttttgctgtatttgatgaagggaaaagttggcactcagaaacaaagaactccttgatgcaggatagggatgctgcatctgctcgggcctggcctaaaatgcacacagtcaatggttatgtaaacaggtctctgccaggtctgattggatgccacaggaaatcagtctattggcatgtgattggaatgggcaccactcctgaagtgcactcaatattcctcgaaggtcacacatttcttgtgaggaaccatcgccaggctagcttggaaatctcgccaataactttccttactgctcaaacactcttgatggaccttggacagtttctactgttttgtcatatctcttcccaccaacatgatggcatggaagcttatgtcaaagtagacagctgtccagaggaaccccaactacgaatgaaaaataatgaagaagcggaagactatgatgatgatcttactgattctgaaatggatgtggtcaggtttgatgatgacaactctccttcctttatccaaattcgctcagttgccaagaagcatcctaaaacttgggtacattacattgctgctgaagaggaggactgggactatgctcccttagtcctcgcccccgatgacagaagttataaaagtcaatatttgaacaatggccctcagcggattggtaggaagtacaaaaaagtccgatttatggcatacacagatgaaacctttaagactcgtgaagctattcagcatgaatcaggaatcttgggacctttactttatggggaagttggagacacactgttgattatatttaagaatcaagcaagcagaccatataacatctaccctcacggaatcactgatgtccgtcctttgtattcaaggagattaccaaaaggtgtaaaacatttgaaggattttccaattctgccaggagaaatattcaaatataaatggacagtgactgtagaagatgggccaactaaatcagatcctcggtgcctgacccgctattactctagtttcgttaatatggagagagatctagcttcaggactcattggccctctcctcatctgctacaaagaatctgtagatcaaagaggaaaccagataatgtcagacaagaggaatgtcatcctgttttctgtatttgatgagaaccgaagctggtacctcacagagaatatacaacgctttctccccaatccagctggagtgcagcttgaggatccagagttccaagcctccaacatcatgcacagcatcaatggctatgtttttgatagtttgcagttgtcagtttgtttgcatgaggtggcatactggtacattctaagcattggagcacagactgacttcctttctgtcttcttctctggatataccttcaaacacaaaatggtctatgaagacacactcaccctattcccattctcaggagaaactgtcttcatgtcgatggaaaacccaggtctatggattctggggtgccacaactcagactttcggaacagaggcatgaccgccttactgaaggtttctagttgtgacaagaacactggtgattattacgaggacagttatgaagatatttcagcatacttgctgagtaaaaacaatgccattgaaccaagaagcttctctcaaaacccaccagtcttgaaacgccatcaacgggaaataactcgtactactcttcagtcagatcaagaggaaatcgattatgatgataccatatcagttgaaatgaagaaggaagattttgacatttatgatgaggatgaaaatcagagcccccgcagctttcaaaagaaaacacgacactattttattgctgcagtggagaggctctgggattatgggatgagtagctccccacatgttctaagaaacagggctcagagtggcagtgtccctcagttcaagaaagttgttttccaggaatttactgatggctcctttactcagcccttataccgtggagaactaaatgaacatttgggactcctggggccatatataagagcagaagttgaagataatatcatggtaactttcagaaatcaggcctctcgtccctattccttctattctagccttatttcttatgaggaagatcagaggcaaggagcagaacctagaaaaaactttgtcaagcctaatgaaaccaaaacttacttttggaaagtgcaacatcatatggcacccactaaagatgagtttgactgcaaagcctgggcttatttctctgatgttgacctggaaaaagatgtgcactcaggcctgattggaccccttctggtctgccacactaacacactgaaccctgctcatgggagacaagtgacagtacaggaatttgctctgtttttcaccatctttgatgagaccaaaagctggtacttcactgaaaatatggaaagaaactgcagggctccctgcaatatccagatggaagatcccacttttaaagagaattatcgcttccatgcaatcaatggctacataatggatacactacctggcttagtaatggctcaggatcaaaggattcgatggtatctgctcagcatgggcagcaatgaaaacatccattctattcatttcagtggacatgtgttcactgtacgaaaaaaagaggagtataaaatggcactgtacaatctctatccaggtgtttttgagacagtggaaatgttaccatccaaagctggaatttggcgggtggaatgccttattggcgagcatctacatgctgggatgagcacactttttctggtgtacagcaataagtgtcagactcccctgggaatggcttctggacacattagagattttcagattacagcttcaggacaatatggacagtgggccccaaagctggccagacttcattattccggatcaatcaatgcctggagcaccaaggagcccttttcttggatcaaggtggatctgttggcaccaatgattattcacggcatcaagacccagggtgcccgtcagaagttctccagcctctacatctctcagtttatcatcatgtatagtcttgatgggaagaagtggcagacttatcgaggaaattccactggaaccttaatggtcttctttggcaatgtggattcatctgggataaaacacaatatttttaaccctccaattattgctcgatacatccgtttgcacccaactcattatagcattcgcagcactcttcgcatggagttgatgggctgtgatttaaatagttgcagcatgccattgggaatggagagtaaagcaatatcagatgcacagattactgcttcatcctactttaccaatatgtttgccacctggtctccttcaaaagctcgacttcacctccaagggaggagtaatgcctggagacctcaggtgaataatccaaaagagtggctgcaagtggacttccagaagacaatgaaagtcacaggagtaactactcagggagtaaaatctctgcttaccagcatgtatgtgaaggagttcctcatctccagcagtcaagatggccatcagtggactctcttttttcagaatggcaaagtaaaggtttttcagggaaatcaagactccttcacacctgtggtgaactctctagacccaccgttactgactcgctaccttcgaattcacccccagagttgggtgcaccagattgccctgaggatggaggttctgggctgcgaggcacaggacctctacggcgccggatcacctggggccgaaacggccgaacaaaaactcatctcagaagaggatctgtcacctgcaaccggttga

SEQ ID NO: 706 - protein, 1524 aa, Artificial Sequence
  Description of Artificial Sequence: Synthetic polypeptide
MQIELSTCFFLCLLRFCFSATRRYYLGAVELSWDYMQSDLGELPVDARFPPRVPKSFPFGAPGSPAGSPTSTEEGTSESATPESGPGSEPATSGSETPASSNTSVVYKKTLFVEFTDHLFNIAKPRPPWMGLLGPTIQAEVYDTVVITLKNMASHPVSLHAVGVSYWKASEGAEYDDQTSQREKEDDKVFPGGSHTYVWQVLKENGPMASDPLCLTYSYLSHVDLVKDLNSGLIGALLVCREGSLAKEKTQTLHKFILLFAVFDEGKSWHSETKNSLMQDRDAASARAWPKMHTVNGYVNRSLPGLIGCHRKSVYWHVIGMGTTPEVHSIFLEGHTFLVRNHRQASLEISPITFLTAQTLLMDLGQFLLFCHISSHQHDGMEAYVKVDSCPEEPQLRMKNNEEAEDYDDDLTDSEMDVVRFDDDNSPSFIQIRSVAKKHPKTWVHYIAAEEEDWDYAPLVLAPDDRSYKSQYLNNGPQRIGRKYKKVRFMAYTDETFKTREAIQHESGILGPLLYGEVGDTLLIIFKNQASRPYNIYPHGITDVRPLYSRRLPKGVKHLKDFPILPGEIFKYKWTVTVEDGPTKSDPRCLTRYYSSFVNMERDLASGLIGPLLICYKESVDQRGNQIMSDKRNVILFSVFDENRSWYLTENIQRFLPNPAGVQLEDPEFQASNIMHSINGYVFDSLQLSVCLHEVAYWYILSIGAQTDFLSVFFSGYTFKHKMVYEDTLTLFPFSGETVFMSMENPGLWILGCHNSDFRNRGMTALLKVSSCDKNTGDYYEDSYEDISAYLLSKNNAIEPRSFSQNPPVLKRHQREITRTTLQSDQEEIDYDDTISVEMKKEDFDIYDEDENQSPRSFQKKTRHYFIAAVERLWDYGMSSSPHVLRNRAQSGSVPQFKKVVFQEFTDGSFTQPLYRGELNEHLGLLGPYIRAEVEDNIMVTFRNQASRPYSFYSSLISYEEDQRQGAEPRKNFVKPNETKTYFWKVQHHMAPTKDEFDCKAWAYFSDVDLEKDVHSGLIGPLLVCHTNTLNPAHGRQVTVQEFALFFTIFDETKSWYFTENMERNCRAPCNIQMEDPTFKENYRFHAINGYIMDTLPGLVMAQDQRIRWYLLSMGSNENIHSIHFSGHVFTVRKKEEYKMALYNLYPGVFETVEMLPSKAGIWRVECLIGEHLHAGMSTLFLVYSNKCQTPLGMASGHIRDFQITASGQYGQWAPKLARLHYSGSINAWSTKEPFSWIKVDLLAPMIIHGIKTQGARQKFSSLYISQFIIMYSLDGKKWQTYRGNSTGTLMVFFGNVDSSGIKHNIFNPPIIARYIRLHPTHYSIRSTLRMELMGCDLNSCSMPLGMESKAISDAQITASSYFTNMFATWSPSKARLHLQGRSNAWRPQVNNPKEWLQVDFQKTMKVTGVTTQGVKSLLTSMYVKEFLISSSQDGHQWTLFFQNGKVKVFQGNQDSFTPVVNSLDPPLLTRYLRIHPQSWVHQIALRMEVLGCEAQDLYGAGSPGAETAEQKLISEEDLSPATG

SEQ ID NO: 707 - DNA, 4575 bp, Artificial Sequence
  Description of Artificial Sequence: Synthetic polynucleotide
atgcaaatagagctctccacctgcttctttctgtgccttttgcgattctgctttagtgccaccagaagatactacctgggtgcagtggaactgtcatgggactatatgcaaagtgatctcggtgagctgcctgtggacgcaagatttcctcctagagtgccaaaatcttttccattcggcgcgccaggttctcctgctggctcccccacctcaacagaagaggggacaagcgaaagcgctacgcctgagagtggccctggctctgagccagccacctccggctctgaaacccctgcctcgagcaacacctcagtcgtgtacaaaaagactctgtttgtagaattcacggatcaccttttcaacatcgctaagccaaggccaccctggatgggtctgctaggtcctaccatccaggctgaggtttatgatacagtggtcattacacttaagaacatggcttcccatcctgtcagtcttcatgctgttggtgtatcctactggaaagcttctgagggagctgaatatgatgatcagaccagtcaaagggagaaagaagatgataaagtcttccctggtggaagccatacatatgtctggcaggtcctgaaagagaatggtccaatggcctctgacccactgtgccttacctactcatatctttctcatgtggacctggtaaaagacttgaattcaggcctcattggagccctactagtatgtagagaagggagtctggccaaggaaaagacacagaccttgcacaaatttatactactttttgctgtatttgatgaagggaaaagttggcactcagaaacaaagaactccttgatgcaggatagggatgctgcatctgctcgggcctggcctaaaatgcacacagtcaatggttatgtaaacaggtctctgccaggtctgattggatgccacaggaaatcagtctattggcatgtgattggaatgggcaccactcctgaagtgcactcaatattcctcgaaggtcacacatttcttgtgaggaaccatcgccaggctagcttggaaatctcgccaataactttccttactgctcaaacactcttgatggaccttggacagtttctactgttttgtcatatctcttcccaccaacatgatggcatggaagcttatgtcaaagtagacagctgtccagaggaaccccaactacgaatgaaaaataatgaagaagcggaagactatgatgatgatcttactgattctgaaatggatgtggtcaggtttgatgatgacaactctccttcctttatccaaattcgctcagttgccaagaagcatcctaaaacttgggtacattacattgctgctgaagaggaggactgggactatgctcccttagtcctcgcccccgatgacagaagttataaaagtcaatatttgaacaatggccctcagcggattggtaggaagtacaaaaaagtccgatttatggcatacacagatgaaacctttaagactcgtgaagctattcagcatgaatcaggaatcttgggacctttactttatggggaagttggagacacactgttgattatatttaagaatcaagcaagcagaccatataacatctaccctcacggaatcactgatgtccgtcctttgtattcaaggagattaccaaaaggtgtaaaacatttgaaggattttccaattctgccaggagaaatattcaaatataaatggacagtgactgtagaagatgggccaactaaatcagatcctcggtgcctgacccgctattactctagtttcgttaatatggagagagatctagcttcaggactcattggccctctcctcatctgctacaaagaatctgtagatcaaagaggaaaccagataatgtcagacaagaggaatgtcatcctgttttctgtatttgatgagaaccgaagctggtacctcacagagaatatacaacgctttctccccaatccagctggagtgcagcttgaggatccagagttccaagcctccaacatcatgcacagcatcaatggctatgtttttgatagtttgcagttgtcagtttgtttgcatgaggtggcatactggtacattctaagcattggagcacagactgacttcctttctgtcttcttctctggatataccttcaaacacaaaatggtctatgaagacacactcaccctattcccattctcaggagaaactgtcttcatgtcgatggaaaacccaggtctatggattctggggtgccacaactcagactttcggaacagaggcatgaccgccttactgaaggtttctagttgtgacaagaacactggtgattattacgaggacagttatgaagatatttcagcatacttgctgagtaaaaacaatgccattgaaccaagaagcttctctcaaaacccaccagtcttgaaacgccatcaacgggaaataactcgtactactcttcagtcagatcaagaggaaatcgattatgatgataccatatcagttgaaatgaagaaggaagattttgacatttatgatgaggatgaaaatcagagcccccgcagctttcaaaagaaaacacgacactattttattgctgcagtggagaggctctgggattatgggatgagtagctccccacatgttctaagaaacagggctcagagtggcagtgtccctcagttcaagaaagttgttttccaggaatttactgatggctcctttactcagcccttataccgtggagaactaaatgaacatttgggactcctggggccatatataagagcagaagttgaagataatatcatggtaactttcagaaatcaggcctctcgtccctattccttctattctagccttatttcttatgaggaagatcagaggcaaggagcagaacctagaaaaaactttgtcaagcctaatgaaaccaaaacttacttttggaaagtgcaacatcatatggcacccactaaagatgagtttgactgcaaagcctgggcttatttctctgatgttgacctggaaaaagatgtgcactcaggcctgattggaccccttctggtctgccacactaacacactgaaccctgctcatgggagacaagtgacagtacaggaatttgctctgtttttcaccatctttgatgagaccaaaagctggtacttcactgaaaatatggaaagaaactgcagggctccctgcaatatccagatggaagatcccacttttaaagagaattatcgcttccatgcaatcaatggctacataatggatacactacctggcttagtaatggctcaggatcaaaggattcgatggtatctgctcagcatgggcagcaatgaaaacatccattctattcatttcagtggacatgtgttcactgtacgaaaaaaagaggagtataaaatggcactgtacaatctctatccaggtgtttttgagacagtggaaatgttaccatccaaagctggaatttggcgggtggaatgccttattggcgagcatctacatgctgggatgagcacactttttctggtgtacagcaataagtgtcagactcccctgggaatggcttctggacacattagagattttcagattacagcttcaggacaatatggacagtgggccccaaagctggccagacttcattattccggatcaatcaatgcctggagcaccaaggagcccttttcttggatcaaggtggatctgttggcaccaatgattattcacggcatcaagacccagggtgcccgtcagaagttctccagcctctacatctctcagtttatcatcatgtatagtcttgatgggaagaagtggcagacttatcgaggaaattccactggaaccttaatggtcttctttggcaatgtggattcatctgggataaaacacaatatttttaaccctccaattattgctcgatacatccgtttgcacccaactcattatagcattcgcagcactcttcgcatggagttgatgggctgtgatttaaatagttgcagcatgccattgggaatggagagtaaagcaatatcagatgcacagattactgcttcatcctactttaccaatatgtttgccacctggtctccttcaaaagctcgacttcacctccaagggaggagtaatgcctggagacctcaggtgaataatccaaaagagtggctgcaagtggacttccagaagacaatgaaagtcacaggagtaactactcagggagtaaaatctctgcttaccagcatgtatgtgaaggagttcctcatctccagcagtcaagatggccatcagtggactctcttttttcagaatggcaaagtaaaggtttttcagggaaatcaagactccttcacacctgtggtgaactctctagacccaccgttactgactcgctaccttcgaattcacccccagagttgggtgcaccagattgccctgaggatggaggttctgggctgcgaggcacaggacctctacggcgccggatcacctggggccgaaacggccgaacaaaaactcatctcagaagaggatctgtcacctgcaaccggttga

SEQ ID NO: 708 - protein, 1524 aa, Artificial Sequence
  Description of Artificial Sequence: Synthetic polypeptide
MQIELSTCFFLCLLRFCFSATRRYYLGAVELSWDYMQSDLGELPVDARFPPRVPKSFPFNTSVVYKKTLFVEFTDHLFNGAPGSPAGSPTSTEEGTSESATPESGPGSEPATSGSETPASSIAKPRPPWMGLLGPTIQAEVYDTVVITLKNMASHPVSLHAVGVSYWKASEGAEYDDQTSQREKEDDKVFPGGSHTYVWQVLKENGPMASDPLCLTYSYLSHVDLVKDLNSGLIGALLVCREGSLAKEKTQTLHKFILLFAVFDEGKSWHSETKNSLMQDRDAASARAWPKMHTVNGYVNRSLPGLIGCHRKSVYWHVIGMGTTPEVHSIFLEGHTFLVRNHRQASLEISPITFLTAQTLLMDLGQFLLFCHISSHQHDGMEAYVKVDSCPEEPQLRMKNNEEAEDYDDDLTDSEMDVVRFDDDNSPSFIQIRSVAKKHPKTWVHYIAAEEEDWDYAPLVLAPDDRSYKSQYLNNGPQRIGRKYKKVRFMAYTDETFKTREAIQHESGILGPLLYGEVGDTLLIIFKNQASRPYNIYPHGITDVRPLYSRRLPKGVKHLKDFPILPGEIFKYKWTVTVEDGPTKSDPRCLTRYYSSFVNMERDLASGLIGPLLICYKESVDQRGNQIMSDKRNVILFSVFDENRSWYLTENIQRFLPNPAGVQLEDPEFQASNIMHSINGYVFDSLQLSVCLHEVAYWYILSIGAQTDFLSVFFSGYTFKHKMVYEDTLTLFPFSGETVFMSMENPGLWILGCHNSDFRNRGMTALLKVSSCDKNTGDYYEDSYEDISAYLLSKNNAIEPRSFSQNPPVLKRHQREITRTTLQSDQEEIDYDDTISVEMKKEDFDIYDEDENQSPRSFQKKTRHYFIAAVERLWDYGMSSSPHVLRNRAQSGSVPQFKKVVFQEFTDGSFTQPLYRGELNEHLGLLGPYIRAEVEDNIMVTFRNQASRPYSFYSSLISYEEDQRQGAEPRKNFVKPNETKTYFWKVQHHMAPTKDEFDCKAWAYFSDVDLEKDVHSGLIGPLLVCHTNTLNPAHGRQVTVQEFALFFTIFDETKSWYFTENMERNCRAPCNIQMEDPTFKENYRFHAINGYIMDTLPGLVMAQDQRIRWYLLSMGSNENIHSIHFSGHVFTVRKKEEYKMALYNLYPGVFETVEMLPSKAGIWRVECLIGEHLHAGMSTLFLVYSNKCQTPLGMASGHIRDFQITASGQYGQWAPKLARLHYSGSINAWSTKEPFSWIKVDLLAPMIIHGIKTQGARQKFSSLYISQFIIMYSLDGKKWQTYRGNSTGTLMVFFGNVDSSGIKHNIFNPPIIARYIRLHPTHYSIRSTLRMELMGCDLNSCSMPLGMESKAISDAQITASSYFTNMFATWSPSKARLHLQGRSNAWRPQVNNPKEWLQVDFQKTMKVTGVTTQGVKSLLTSMYVKEFLISSSQDGHQWTLFFQNGKVKVFQGNQDSFTPVVNSLDPPLLTRYLRIHPQSWVHQIALRMEVLGCEAQDLYGAGSPGAETAEQKLISEEDLSPATG

SEQ ID NO: 709 - DNA, 4575 bp, Artificial Sequence
  Description of Artificial Sequence: Synthetic polynucleotide
atgcaaatagagctctccacctgcttctttctgtgccttttgcgattctgctttagtgccaccagaagatactacctgggtgcagtggaactgtcatgggactatatgcaaagtgatctcggtgagctgcctgtggacgcaagatttcctcctagagtgccaaaatcttttccattcaacacctcagtcgtgtacaaaaagactctgtttgtagaattcacggatcaccttttcaacggcgcgccaggttctcctgctggctcccccacctcaacagaagaggggacaagcgaaagcgctacgcctgagagtggccctggctctgagccagccacctccggctctgaaacccctgcctcgagcatcgctaagccaaggccaccctggatgggtctgctaggtcctaccatccaggctgaggtttatgatacagtggtcattacacttaagaacatggcttcccatcctgtcagtcttcatgctgttggtgtatcctactggaaagcttctgagggagctgaatatgatgatcagaccagtcaaagggagaaagaagatgataaagtcttccctggtggaagccatacatatgtctggcaggtcctgaaagagaatggtccaatggcctctgacccactgtgccttacctactcatatctttctcatgtggacctggtaaaagacttgaattcaggcctcattggagccctactagtatgtagagaagggagtctggccaaggaaaagacacagaccttgcacaaatttatactactttttgctgtatttgatgaagggaaaagttggcactcagaaacaaagaactccttgatgcaggatagggatgctgcatctgctcgggcctggcctaaaatgcacacagtcaatggttatgtaaacaggtctctgccaggtctgattggatgccacaggaaatcagtctattggcatgtgattggaatgggcaccactcctgaagtgcactcaatattcctcgaaggtcacacatttcttgtgaggaaccatcgccaggctagcttggaaatctcgccaataactttccttactgctcaaacactcttgatggaccttggacagtttctactgttttgtcatatctcttcccaccaacatgatggcatggaagcttatgtcaaagtagacagctgtccagaggaaccccaactacgaatgaaaaataatgaagaagcggaagactatgatgatgatcttactgattctgaaatggatgtggtcaggtttgatgatgacaactctccttcctttatccaaattcgctcagttgccaagaagcatcctaaaacttgggtacattacattgctgctgaagaggaggactgggactatgctcccttagtcctcgcccccgatgacagaagttataaaagtcaatatttgaacaatggccctcagcggattggtaggaagtacaaaaaagtccgatttatggcatacacagatgaaacctttaagactcgtgaagctattcagcatgaatcaggaatcttgggacctttactttatggggaagttggagacacactgttgattatatttaagaatcaagcaagcagaccatataacatctaccctcacggaatcactgatgtccgtcctttgtattcaaggagattaccaaaaggtgtaaaacatttgaaggattttccaattctgccaggagaaatattcaaatataaatggacagtgactgtagaagatgggccaactaaatcagatcctcggtgcctgacccgctattactctagtttcgttaatatggagagagatctagcttcaggactcattggccctctcctcatctgctacaaagaatctgtagatcaaagaggaaaccagataatgtcagacaagaggaatgtcatcctgttttctgtatttgatgagaaccgaagctggtacctcacagagaatatacaacgctttctccccaatccagctggagtgcagcttgaggatccagagttccaagcctccaacatcatgcacagcatcaatggctatgtttttgatagtttgcagttgtcagtttgtttgcatgaggtggcatactggtacattctaagcattggagcacagactgacttcctttctgtcttcttctctggatataccttcaaacacaaaatggtctatgaagacacactcaccctattcccattctcaggagaaactgtcttcatgtcgatggaaaacccaggtctatggattctggggtgccacaactcagactttcggaacagaggcatgaccgccttactgaaggtttctagttgtgacaagaacactggtgattattacgaggacagttatgaagatatttcagcatacttgctgagtaaaaacaatgccattgaaccaagaagcttctctcaaaacccaccagtcttgaaacgccatcaacgggaaataactcgtactactcttcagtcagatcaagaggaaatcgattatgatgataccatatcagttgaaatgaagaaggaagattttgacatttatgatgaggatgaaaatcagagcccccgcagctttcaaaagaaaacacgacactattttattgctgcagtggagaggctctgggattatgggatgagtagctccccacatgttctaagaaacagggctcagagtggcagtgtccctcagttcaagaaagttgttttccaggaatttactgatggctcctttactcagcccttataccgtggagaactaaatgaacatttgggactcctggggccatatataagagcagaagttgaagataatatcatggtaactttcagaaatcaggcctctcgtccctattccttctattctagccttatttcttatgaggaagatcagaggcaaggagcagaacctagaaaaaactttgtcaagcctaatgaaaccaaaacttacttttggaaagtgcaacatcatatggcacccactaaagatgagtttgactgcaaagcctgggcttatttctctgatgttgacctggaaaaagatgtgcactcaggcctgattggaccccttctggtctgccacactaacacactgaaccctgctcatgggagacaagtgacagtacaggaatttgctctgtttttcaccatctttgatgagaccaaaagctggtacttcactgaaaatatggaaagaaactgcagggctccctgcaatatccagatggaagatcccacttttaaagagaattatcgcttccatgcaatcaatggctacataatggatacactacctggcttagtaatggctcaggatcaaaggattcgatggtatctgctcagcatgggcagcaatgaaaacatccattctattcatttcagtggacatgtgttcactgtacgaaaaaaagaggagtataaaatggcactgtacaatctctatccaggtgtttttgagacagtggaaatgttaccatccaaagctggaatttggcgggtggaatgccttattggcgagcatctacatgctgggatgagcacactttttctggtgtacagcaataagtgtcagactcccctgggaatggcttctggacacattagagattttcagattacagcttcaggacaatatggacagtgggccccaaagctggccagacttcattattccggatcaatcaatgcctggagcaccaaggagcccttttcttggatcaaggtggatctgttggcaccaatgattattcacggcatcaagacccagggtgcccgtcagaagttctccagcctctacatctctcagtttatcatcatgtatagtcttgatgggaagaagtggcagacttatcgaggaaattccactggaaccttaatggtcttctttggcaatgtggattcatctgggataaaacacaatatttttaaccctccaattattgctcgatacatccgtttgcacccaactcattatagcattcgcagcactcttcgcatggagttgatgggctgtgatttaaatagttgcagcatgccattgggaatggagagtaaagcaatatcagatgcacagattactgcttcatcctactttaccaatatgtttgccacctggtctccttcaaaagctcgacttcacctccaagggaggagtaatgcctggagacctcaggtgaataatccaaaagagtggctgcaagtggacttccagaagacaatgaaagtcacaggagtaactactcagggagtaaaatctctgcttaccagcatgtatgtgaaggagttcctcatctccagcagtcaagatggccatcagtggactctcttttttcagaatggcaaagtaaaggtttttcagggaaatcaagactccttcacacctgtggtgaactctctagacccaccgttactgactcgctaccttcgaattcacccccagagttgggtgcaccagattgccctgaggatggaggttctgggctgcgaggcacaggacctctacggcgccggatcacctggggccgaaacggccgaacaaaaactcatctcagaagaggatctgtcacctgcaaccggttga

SEQ ID NO: 710 - protein, 1524 aa, Artificial Sequence
  Description of Artificial Sequence: Synthetic polypeptide
MQIELSTCFFLCLLRFCFSATRRYYLGAVELSWDYMQSDLGELPVDARFPPRVPKSFPFNTSVVYKKTLFVEFTDHLFNIAKPRPPWMGLLGPTIQAEVYDTVVITLKNMASHPVSLHAVGVSYWKASEGAEYDDGAPGSPAGSPTSTEEGTSESATPESGPGSEPATSGSETPASSQTSQREKEDDKVFPGGSHTYVWQVLKENGPMASDPLCLTYSYLSHVDLVKDLNSGLIGALLVCREGSLAKEKTQTLHKFILLFAVFDEGKSWHSETKNSLMQDRDAASARAWPKMHTVNGYVNRSLPGLIGCHRKSVYWHVIGMGTTPEVHSIFLEGHTFLVRNHRQASLEISPITFLTAQTLLMDLGQFLLFCHISSHQHDGMEAYVKVDSCPEEPQLRMKNNEEAEDYDDDLTDSEMDVVRFDDDNSPSFIQIRSVAKKHPKTWVHYIAAEEEDWDYAPLVLAPDDRSYKSQYLNNGPQRIGRKYKKVRFMAYTDETFKTREAIQHESGILGPLLYGEVGDTLLIIFKNQASRPYNIYPHGITDVRPLYSRRLPKGVKHLKDFPILPGEIFKYKWTVTVEDGPTKSDPRCLTRYYSSFVNMERDLASGLIGPLLICYKESVDQRGNQIMSDKRNVILFSVFDENRSWYLTENIQRFLPNPAGVQLEDPEFQASNIMHSINGYVFDSLQLSVCLHEVAYWYILSIGAQTDFLSVFFSGYTFKHKMVYEDTLTLFPFSGETVFMSMENPGLWILGCHNSDFRNRGMTALLKVSSCDKNTGDYYEDSYEDISAYLLSKNNAIEPRSFSQNPPVLKRHQREITRTTLQSDQEEIDYDDTISVEMKKEDFDIYDEDENQSPRSFQKKTRHYFIAAVERLWDYGMSSSPHVLRNRAQSGSVPQFKKVVFQEFTDGSFTQPLYRGELNEHLGLLGPYIRAEVEDNIMVTFRNQASRPYSFYSSLISYEEDQRQGAEPRKNFVKPNETKTYFWKVQHHMAPTKDEFDCKAWAYFSDVDLEKDVHSGLIGPLLVCHTNTLNPAHGRQVTVQEFALFFTIFDETKSWYFTENMERNCRAPCNIQMEDPTFKENYRFHAINGYIMDTLPGLVMAQDQRIRWYLLSMGSNENIHSIHFSGHVFTVRKKEEYKMALYNLYPGVFETVEMLPSKAGIWRVECLIGEHLHAGMSTLFLVYSNKCQTPLGMASGHIRDFQITASGQYGQWAPKLARLHYSGSINAWSTKEPFSWIKVDLLAPMIIHGIKTQGARQKFSSLYISQFIIMYSLDGKKWQTYRGNSTGTLMVFFGNVDSSGIKHNIFNPPIIARYIRLHPTHYSIRSTLRMELMGCDLNSCSMPLGMESKAISDAQITASSYFTNMFATWSPSKARLHLQGRSNAWRPQVNNPKEWLQVDFQKTMKVTGVTTQGVKSLLTSMYVKEFLISSSQDGHQWTLFFQNGKVKVFQGNQDSFTPVVNSLDPPLLTRYLRIHPQSWVHQIALRMEVLGCEAQDLYGAGSPGAETAEQKLISEEDLSPATG

SEQ ID NO: 711 - DNA, 4575 bp, Artificial Sequence
  Description of Artificial Sequence: Synthetic polynucleotide
atgcaaatagagctctccacctgcttctttctgtgccttttgcgattctgctttagtgccaccagaagatactacctgggtgcagtggaactgtcatgggactatatgcaaagtgatctcggtgagctgcctgtggacgcaagatttcctcctagagtgccaaaatcttttccattcaacacctcagtcgtgtacaaaaagactctgtttgtagaattcacggatcaccttttcaacatcgctaagccaaggccaccctggatgggtctgctaggtcctaccatccaggctgaggtttatgatacagtggtcattacacttaagaacatggcttcccatcctgtcagtcttcatgctgttggtgtatcctactggaaagcttctgagggagctgaatatgatgatggcgcgccaggttctcctgctggctcccccacctcaacagaagaggggacaagcgaaagcgctacgcctgagagtggccctggctctgagccagccacctccggctctgaaacccctgcctcgagccagaccagtcaaagggagaaagaagatgataaagtcttccctggtggaagccatacatatgtctggcaggtcctgaaagagaatggtccaatggcctctgacccactgtgccttacctactcatatctttctcatgtggacctggtaaaagacttgaattcaggcctcattggagccctactagtatgtagagaagggagtctggccaaggaaaagacacagaccttgcacaaatttatactactttttgctgtatttgatgaagggaaaagttggcactcagaaacaaagaactccttgatgcaggatagggatgctgcatctgctcgggcctggcctaaaatgcacacagtcaatggttatgtaaacaggtctctgccaggtctgattggatgccacaggaaatcagtctattggcatgtgattggaatgggcaccactcctgaagtgcactcaatattcctcgaaggtcacacatttcttgtgaggaaccatcgccaggctagcttggaaatctcgccaataactttccttactgctcaaacactcttgatggaccttggacagtttctactgttttgtcatatctcttcccaccaacatgatggcatggaagcttatgtcaaagtagacagctgtccagaggaaccccaactacgaatgaaaaataatgaagaagcggaagactatgatgatgatcttactgattctgaaatggatgtggtcaggtttgatgatgacaactctccttcctttatccaaattcgctcagttgccaagaagcatcctaaaacttgggtacattacattgctgctgaagaggaggactgggactatgctcccttagtcctcgcccccgatgacagaagttataaaagtcaatatttgaacaatggccctcagcggattggtaggaagtacaaaaaagtccgatttatggcatacacagatgaaacctttaagactcgtgaagctattcagcatgaatcaggaatcttgggacctttactttatggggaagttggagacacactgttgattatatttaagaatcaagcaagcagaccatataacatctaccctcacggaatcactgatgtccgtcctttgtattcaaggagattaccaaaaggtgtaaaacatttgaaggattttccaattctgccaggagaaatattcaaatataaatggacagtgactgtagaagatgggccaactaaatcagatcctcggtgcctgacccgctattactctagtttcgttaatatggagagagatctagcttcaggactcattggccctctcctcatctgctacaaagaatctgtagatcaaagaggaaaccagataatgtcagacaagaggaatgtcatcctgttttctgtatttgatgagaaccgaagctggtacctcacagagaatatacaacgctttctccccaatccagctggagtgcagcttgaggatccagagttccaagcctccaacatcatgcacagcatcaatggctatgtttttgatagtttgcagttgtcagtttgtttgcatgaggtggcatactggtacattctaagcattggagcacagactgacttcctttctgtcttcttctctggatataccttcaaacacaaaatggtctatgaagacacactcaccctattcccattctcaggagaaactgtcttcatgtcgatggaaaacccaggtctatggattctggggtgccacaactcagactttcggaacagaggcatgaccgccttactgaaggtttctagttgtgacaagaacactggtgattattacgaggacagttatgaagatatttcagcatacttgctgagtaaaaacaatgccattgaaccaagaagcttctctcaaaacccaccagtcttgaaacgccatcaacgggaaataactcgtactactcttcagtcagatcaagaggaaatcgattatgatgataccatatcagttgaaatgaagaaggaagattttgacatttatgatgaggatgaaaatcagagcccccgcagctttcaaaagaaaacacgacactattttattgctgcagtggagaggctctgggattatgggatgagtagctccccacatgttctaagaaacagggctcagagtggcagtgtccctcagttcaagaaagttgttttccaggaatttactgatggctcctttactcagcccttataccgtggagaactaaatgaacatttgggactcctggggccatatataagagcagaagttgaagataatatcatggtaactttcagaaatcaggcctctcgtccctattccttctattctagccttatttcttatgaggaagatcagaggcaaggagcagaacctagaaaaaactttgtcaagcctaatgaaaccaaaacttacttttggaaagtgcaacatcatatggcacccactaaagatgagtttgactgcaaagcctgggcttatttctctgatgttgacctggaaaaagatgtgcactcaggcctgattggaccccttctggtctgccacactaacacactgaaccctgctcatgggagacaagtgacagtacaggaatttgctctgtttttcaccatctttgatgagaccaaaagctggtacttcactgaaaatatggaaagaaactgcagggctccctgcaatatccagatggaagatcccacttttaaagagaattatcgcttccatgcaatcaatggctacataatggatacactacctggcttagtaatggctcaggatcaaaggattcgatggtatctgctcagcatgggcagcaatgaaaacatccattctattcatttcagtggacatgtgttcactgtacgaaaaaaagaggagtataaaatggcactgtacaatctctatccaggtgtttttgagacagtggaaatgttaccatccaaagctggaatttggcgggtggaatgccttattggcgagcatctacatgctgggatgagcacactttttctggtgtacagcaataagtgtcagactcccctgggaatggcttctggacacattagagattttcagattacagcttcaggacaatatggacagtgggccccaaagctggccagacttcattattccggatcaatcaatgcctggagcaccaaggagcccttttcttggatcaaggtggatctgttggcaccaatgattattcacggcatcaagacccagggtgcccgtcagaagttctccagcctctacatctctcagtttatcatcatgtatagtcttgatgggaagaagtggcagacttatcgaggaaattccactggaaccttaatggtcttctttggcaatgtggattcatctgggataaaacacaatatttttaaccctccaattattgctcgatacatccgtttgcacccaactcattatagcattcgcagcactcttcgcatggagttgatgggctgtgatttaaatagttgcagcatgccattgggaatggagagtaaagcaatatcagatgcacagattactgcttcatcctactttaccaatatgtttgccacctggtctccttcaaaagctcgacttcacctccaagggaggagtaatgcctggagacctcaggtgaataatccaaaagagtggctgcaagtggacttccagaagacaatgaaagtcacaggagtaactactcagggagtaaaatctctgcttaccagcatgtatgtgaaggagttcctcatctccagcagtcaagatggccatcagtggactctcttttttcagaatggcaaagtaaaggtttttcagggaaatcaagactccttcacacctgtggtgaactctctagacccaccgttactgactcgctaccttcgaattcacccccagagttgggtgcaccagattgccctgaggatggaggttctgggctgcgaggcacaggacctctacggcgccggatcacctggggccgaaacggccgaacaaaaactcatctcagaagaggatctgtcacctgcaaccggttga

SEQ ID NO: 712 - protein, 1524 aa, Artificial Sequence
  Description of Artificial Sequence: Synthetic polypeptide
MQIELSTCFFLCLLRFCFSATRRYYLGAVELSWDYMQSDLGELPVDARFPPRVPKSFPFNTSVVYKKTLFVEFTDHLFNIAKPRPPWMGLLGPTIQAEVYDTVVITLKNMASHPVSLHAVGVSYWKASEGAEYDDQTSQREKEDDKVFPGAPGSPAGSPTSTEEGTSESATPESGPGSEPATSGSETPASSGGSHTYVWQVLKENGPMASDPLCLTYSYLSHVDLVKDLNSGLIGALLVCREGSLAKEKTQTLHKFILLFAVFDEGKSWHSETKNSLMQDRDAASARAWPKMHTVNGYVNRSLPGLIGCHRKSVYWHVIGMGTTPEVHSIFLEGHTFLVRNHRQASLEISPITFLTAQTLLMDLGQFLLFCHISSHQHDGMEAYVKVDSCPEEPQLRMKNNEEAEDYDDDLTDSEMDVVRFDDDNSPSFIQIRSVAKKHPKTWVHYIAAEEEDWDYAPLVLAPDDRSYKSQYLNNGPQRIGRKYKKVRFMAYTDETFKTREAIQHESGILGPLLYGEVGDTLLIIFKNQASRPYNIYPHGITDVRPLYSRRLPKGVKHLKDFPILPGEIFKYKWTVTVEDGPTKSDPRCLTRYYSSFVNMERDLASGLIGPLLICYKESVDQRGNQIMSDKRNVILFSVFDENRSWYLTENIQRFLPNPAGVQLEDPEFQASNIMHSINGYVFDSLQLSVCLHEVAYWYILSIGAQTDFLSVFFSGYTFKHKMVYEDTLTLFPFSGETVFMSMENPGLWILGCHNSDFRNRGMTALLKVSSCDKNTGDYYEDSYEDISAYLLSKNNAIEPRSFSQNPPVLKRHQREITRTTLQSDQEEIDYDDTISVEMKKEDFDIYDEDENQSPRSFQKKTRHYFIAAVERLWDYGMSSSPHVLRNRAQSGSVPQFKKVVFQEFTDGSFTQPLYRGELNEHLGLLGPYIRAEVEDNIMVTFRNQASRPYSFYSSLISYEEDQRQGAEPRKNFVKPNETKTYFWKVQHHMAPTKDEFDCKAWAYFSDVDLEKDVHSGLIGPLLVCHTNTLNPAHGRQVTVQEFALFFTIFDETKSWYFTENMERNCRAPCNIQMEDPTFKENYRFHAINGYIMDTLPGLVMAQDQRIRWYLLSMGSNENIHSIHFSGHVFTVRKKEEYKMALYNLYPGVFETVEMLPSKAGIWRVECLIGEHLHAGMSTLFLVYSNKCQTPLGMASGHIRDFQITASGQYGQWAPKLARLHYSGSINAWSTKEPFSWIKVDLLAPMIIHGIKTQGARQKFSSLYISQFIIMYSLDGKKWQTYRGNSTGTLMVFFGNVDSSGIKHNIFNPPIIARYIRLHPTHYSIRSTLRMELMGCDLNSCSMPLGMESKAISDAQITASSYFTNMFATWSPSKARLHLQGRSNAWRPQVNNPKEWLQVDFQKTMKVTGVTTQGVKSLLTSMYVKEFLISSSQDGHQWTLFFQNGKVKVFQGNQDSFTPVVNSLDPPLLTRYLRIHPQSWVHQIALRMEVLGCEAQDLYGAGSPGAETAEQKLISEEDLSPATG

SEQ ID NO: 713 - DNA, 4575 bp, Artificial Sequence
  Description of Artificial Sequence: Synthetic polynucleotide
atgcaaatagagctctccacctgcttctttctgtgccttttgcgattctgctttagtgccaccagaagatactacctgggtgcagtggaactgtcatgggactatatgcaaagtgatctcggtgagctgcctgtggacgcaagatttcctcctagagtgccaaaatcttttccattcaacacctcagtcgtgtacaaaaagactctgtttgtagaattcacggatcaccttttcaacatcgctaagccaaggccaccctggatgggtctgctaggtcctaccatccaggctgaggtttatgatacagtggtcattacacttaagaacatggcttcccatcctgtcagtcttcatgctgttggtgtatcctactggaaagcttctgagggagctgaatatgatgatcagaccagtcaaagggagaaagaagatgataaagtcttccctggcgcgccaggttctcctgctggctcccccacctcaacagaagaggggacaagcgaaagcgctacgcctgagagtggccctggctctgagccagccacctccggctctgaaacccctgcctcgagcggtggaagccatacatatgtctggcaggtcctgaaagagaatggtccaatggcctctgacccactgtgccttacctactcatatctttctcatgtggacctggtaaaagacttgaattcaggcctcattggagccctactagtatgtagagaagggagtctggccaaggaaaagacacagaccttgcacaaatttatactactttttgctgtatttgatgaagggaaaagttggcactcagaaacaaagaactccttgatgcaggatagggatgctgcatctgctcgggcctggcctaaaatgcacacagtcaatggttatgtaaacaggtctctgccaggtctgattggatgccacaggaaatcagtctattggcatgtgattggaatgggcaccactcctgaagtgcactcaatattcctcgaaggtcacacatttcttgtgaggaaccatcgccaggctagcttggaaatctcgccaataactttccttactgctcaaacactcttgatggaccttggacagtttctactgttttgtcatatctcttcccaccaacatgatggcatggaagcttatgtcaaagtagacagctgtccagaggaaccccaactacgaatgaaaaataatgaagaagcggaagactatgatgatgatcttactgattctgaaatggatgtggtcaggtttgatgatgacaactctccttcctttatccaaattcgctcagttgccaagaagcatcctaaaacttgggtacattacattgctgctgaagaggaggactgggactatgctcccttagtcctcgcccccgatgacagaagttataaaagtcaatatttgaacaatggccctcagcggattggtaggaagtacaaaaaagtccgatttatggcatacacagatgaaacctttaagactcgtgaagctattcagcatgaatcaggaatcttgggacctttactttatggggaagttggagacacactgttgattatatttaagaatcaagcaagcagaccatataacatctaccctcacggaatcactgatgtccgtcctttgtattcaaggagattaccaaaaggtgtaaaacatttgaaggattttccaattctgccaggagaaatattcaaatataaatggacagtgactgtagaagatgggccaactaaatcagatcctcggtgcctgacccgctattactctagtttcgttaatatggagagagatctagcttcaggactcattggccctctcctcatctgctacaaagaatctgtagatcaaagaggaaaccagataatgtcagacaagaggaatgtcatcctgttttctgtatttgatgagaaccgaagctggtacctcacagagaatatacaacgctttctccccaatccagctggagtgcagcttgaggatccagagttccaagcctccaacatcatgcacagcatcaatggctatgtttttgatagtttgcagttgtcagtttgtttgcatgaggtggcatactggtacattctaagcattggagcacagactgacttcctttctgtcttcttctctggatataccttcaaacacaaaatggtctatgaagacacactcaccctattcccattctcaggagaaactgtcttcatgtcgatggaaaacccaggtctatggattctggggtgccacaactcagactttcggaacagaggcatgaccgccttactgaaggtttctagttgtgacaagaacactggtgattattacgaggacagttatgaagatatttcagcatacttgctgagtaaaaacaatgccattgaaccaagaagcttctctcaaaacccaccagtcttgaaacgccatcaacgggaaataactcgtactactcttcagtcagatcaagaggaaatcgattatgatgataccatatcagttgaaatgaagaaggaagattttgacatttatgatgaggatgaaaatcagagcccccgcagctttcaaaagaaaacacgacactattttattgctgcagtggagaggctctgggattatgggatgagtagctccccacatgttctaagaaacagggctcagagtggcagtgtccctcagttcaagaaagttgttttccaggaatttactgatggctcctttactcagcccttataccgtggagaactaaatgaacatttgggactcctggggccatatataagagcagaagttgaagataatatcatggtaactttcagaaatcaggcctctcgtccctattccttctattctagccttatttcttatgaggaagatcagaggcaaggagcagaacctagaaaaaactttgtcaagcctaatgaaaccaaaacttacttttggaaagtgcaacatcatatggcacccactaaagatgagtttgactgcaaagcctgggcttatttctctgatgttgacctggaaaaagatgtgcactcaggcctgattggaccccttctggtctgccacactaacacactgaaccctgctcatgggagacaagtgacagtacaggaatttgctctgtttttcaccatctttgatgagaccaaaagctggtacttcactgaaaatatggaaagaaactgcagggctccctgcaatatccagatggaagatcccacttttaaagagaattatcgcttccatgcaatcaatggctacataatggatacactacctggcttagtaatggctcaggatcaaaggattcgatggtatctgctcagcatgggcagcaatgaaaacatccattctattcatttcagtggacatgtgttcactgtacgaaaaaaagaggagtataaaatggcactgtacaatctctatccaggtgtttttgagacagtggaaatgttaccatccaaagctggaatttggcgggtggaatgccttattggcgagcatctacatgctgggatgagcacactttttctggtgtacagcaataagtgtcagactcccctgggaatggcttctggacacattagagattttcagattacagcttcaggacaatatggacagtgggccccaaagctggccagacttcattattccggatcaatcaatgcctggagcaccaaggagcccttttcttggatcaaggtggatctgttggcaccaatgattattcacggcatcaagacccagggtgcccgtcagaagttctccagcctctacatctctcagtttatcatcatgtatagtcttgatgggaagaagtggcagacttatcgaggaaattccactggaaccttaatggtcttctttggcaatgtggattcatctgggataaaacacaatatttttaaccctccaattattgctcgatacatccgtttgcacccaactcattatagcattcgcagcactcttcgcatggagttgatgggctgtgatttaaatagttgcagcatgccattgggaatggagagtaaagcaatatcagatgcacagattactgcttcatcctactttaccaatatgtttgccacctggtctccttcaaaagctcgacttcacctccaagggaggagtaatgcctggagacctcaggtgaataatccaaaagagtggctgcaagtggacttccagaagacaatgaaagtcacaggagtaactactcagggagtaaaatctctgcttaccagcatgtatgtgaaggagttcctcatctccagcagtcaagatggccatcagtggactctcttttttcagaatggcaaagtaaaggtttttcagggaaatcaagactccttcacacctgtggtgaactctctagacccaccgttactgactcgctaccttcgaattcacccccagagttgggtgcaccagattgccctgaggatggaggttctgggctgcgaggcacaggacctctacggcgccggatcacctggggccgaaacggccgaacaaaaactcatctcagaagaggatctgtcacctgcaaccggttga

SEQ ID NO: 714 - protein, 1524 aa, Artificial Sequence
  Description of Artificial Sequence: Synthetic polypeptide
MQIELSTCFFLCLLRFCFSATRRYYLGAVELSWDYMQSDLGELPVDARFPPRVPKSFPFNTSVVYKKTLFVEFTDHLFNIAKPRPPWMGLLGPTIQAEVYDTVVITLKNMASHPVSLHAVGVSYWKASEGAEYDDQTSQREKEDDKVFPGGSHTYVWQVLKENGPMASDPLCLTYSYLSHVDLVKDLNSGLIGALLVCREGSLAKEKGAPGSPAGSPTSTEEGTSESATPESGPGSEPATSGSETPASSTQTLHKFILLFAVFDEGKSWHSETKNSLMQDRDAASARAWPKMHTVNGYVNRSLPGLIGCHRKSVYWHVIGMGTTPEVHSIFLEGHTFLVRNHRQASLEISPITFLTAQTLLMDLGQFLLFCHISSHQHDGMEAYVKVDSCPEEPQLRMKNNEEAEDYDDDLTDSEMDVVRFDDDNSPSFIQIRSVAKKHPKTWVHYIAAEEEDWDYAPLVLAPDDRSYKSQYLNNGPQRIGRKYKKVRFMAYTDETFKTREAIQHESGILGPLLYGEVGDTLLIIFKNQASRPYNIYPHGITDVRPLYSRRLPKGVKHLKDFPILPGEIFKYKWTVTVEDGPTKSDPRCLTRYYSSFVNMERDLASGLIGPLLICYKESVDQRGNQIMSDKRNVILFSVFDENRSWYLTENIQRFLPNPAGVQLEDPEFQASNIMHSINGYVFDSLQLSVCLHEVAYWYILSIGAQTDFLSVFFSGYTFKHKMVYEDTLTLFPFSGETVFMSMENPGLWILGCHNSDFRNRGMTALLKVSSCDKNTGDYYEDSYEDISAYLLSKNNAIEPRSFSQNPPVLKRHQREITRTTLQSDQEEIDYDDTISVEMKKEDFDIYDEDENQSPRSFQKKTRHYFIAAVERLWDYGMSSSPHVLRNRAQSGSVPQFKKVVFQEFTDGSFTQPLYRGELNEHLGLLGPYIRAEVEDNIMVTFRNQASRPYSFYSSLISYEEDQRQGAEPRKNFVKPNETKTYFWKVQHHMAPTKDEFDCKAWAYFSDVDLEKDVHSGLIGPLLVCHTNTLNPAHGRQVTVQEFALFFTIFDETKSWYFTENMERNCRAPCNIQMEDPTFKENYRFHAINGYIMDTLPGLVMAQDQRIRWYLLSMGSNENIHSIHFSGHVFTVRKKEEYKMALYNLYPGVFETVEMLPSKAGIWRVECLIGEHLHAGMSTLFLVYSNKCQTPLGMASGHIRDFQITASGQYGQWAPKLARLHYSGSINAWSTKEPFSWIKVDLLAPMIIHGIKTQGARQKFSSLYISQFIIMYSLDGKKWQTYRGNSTGTLMVFFGNVDSSGIKHNIFNPPIIARYIRLHPTHYSIRSTLRMELMGCDLNSCSMPLGMESKAISDAQITASSYFTNMFATWSPSKARLHLQGRSNAWRPQVNNPKEWLQVDFQKTMKVTGVTTQGVKSLLTSMYVKEFLISSSQDGHQWTLFFQNGKVKVFQGNQDSFTPVVNSLDPPLLTRYLRIHPQSWVHQIALRMEVLGCEAQDLYGAGSPGAETAEQKLISEEDLSPATG

SEQ ID NO: 715 - DNA, 4575 bp, Artificial Sequence
  Description of Artificial Sequence: Synthetic polynucleotide
atgcaaatagagctctccacctgcttctttctgtgccttttgcgattctgctttagtgccaccagaagatactacctgggtgcagtggaactgtcatgggactatatgcaaagtgatctcggtgagctgcctgtggacgcaagatttcctcctagagtgccaaaatcttttccattcaacacctcagtcgtgtacaaaaagactctgtttgtagaattcacggatcaccttttcaacatcgctaagccaaggccaccctggatgggtctgctaggtcctaccatccaggctgaggtttatgatacagtggtcattacacttaagaacatggcttcccatcctgtcagtcttcatgctgttggtgtatcctactggaaagcttctgagggagctgaatatgatgatcagaccagtcaaagggagaaagaagatgataaagtcttccctggtggaagccatacatatgtctggcaggtcctgaaagagaatggtccaatggcctctgacccactgtgccttacctactcatatctttctcatgtggacctggtaaaagacttgaattcaggcctcattggagccctactagtatgtagagaagggagtctggccaaggaaaagggcgcgccaggttctcctgctggctcccccacctcaacagaagaggggacaagcgaaagcgctacgcctgagagtggccctggctctgagccagccacctccggctctgaaacccctgcctcgagcacacagaccttgcacaaatttatactactttttgctgtatttgatgaagggaaaagttggcactcagaaacaaagaactccttgatgcaggatagggatgctgcatctgctcgggcctggcctaaaatgcacacagtcaatggttatgtaaacaggtctctgccaggtctgattggatgccacaggaaatcagtctattggcatgtgattggaatgggcaccactcctgaagtgcactcaatattcctcgaaggtcacacatttcttgtgaggaaccatcgccaggctagcttggaaatctcgccaataactttccttactgctcaaacactcttgatggaccttggacagtttctactgttttgtcatatctcttcccaccaacatgatggcatggaagcttatgtcaaagtagacagctgtccagaggaaccccaactacgaatgaaaaataatgaagaagcggaagactatgatgatgatcttactgattctgaaatggatgtggtcaggtttgatgatgacaactctccttcctttatccaaattcgctcagttgccaagaagcatcctaaaacttgggtacattacattgctgctgaagaggaggactgggactatgctcccttagtcctcgcccccgatgacagaagttataaaagtcaatatttgaacaatggccctcagcggattggtaggaagtacaaaaaagtccgatttatggcatacacagatgaaacctttaagactcgtgaagctattcagcatgaatcaggaatcttgggacctttactttatggggaagttggagacacactgttgattatatttaagaatcaagcaagcagaccatataacatctaccctcacggaatcactgatgtccgtcctttgtattcaaggagattaccaaaaggtgtaaaacatttgaaggattttccaattctgccaggagaaatattcaaatataaatggacagtgactgtagaagatgggccaactaaatcagatcctcggtgcctgacccgctattactctagtttcgttaatatggagagagatctagcttcaggactcattggccctctcctcatctgctacaaagaatctgtagatcaaagaggaaaccagataatgtcagacaagaggaatgtcatcctgttttctgtatttgatgagaaccgaagctggtacctcacagagaatatacaacgctttctccccaatccagctggagtgcagcttgaggatccagagttccaagcctccaacatcatgcacagcatcaatggctatgtttttgatagtttgcagttgtcagtttgtttgcatgaggtggcatactggtacattctaagcattggagcacagactgacttcctttctgtcttcttctctggatataccttcaaacacaaaatggtctatgaagacacactcaccctattcccattctcaggagaaactgtcttcatgtcgatggaaaacccaggtctatggattctggggtgccacaactcagactttcggaacagaggcatgaccgccttactgaaggtttctagttgtgacaagaacactggtgattattacgaggacagttatgaagatatttcagcatacttgctgagtaaaaacaatgccattgaaccaagaagcttctctcaaaacccaccagtcttgaaacgccatcaacgggaaataactcgtactactcttcagtcagatcaagaggaaatcgattatgatgataccatatcagttgaaatgaagaaggaagattttgacatttatgatgaggatgaaaatcagagcccccgcagctttcaaaagaaaacacgacactattttattgctgcagtggagaggctctgggattatgggatgagtagctccccacatgttctaagaaacagggctcagagtggcagtgtccctcagttcaagaaagttgttttccaggaatttactgatggctcctttactcagcccttataccgtggagaactaaatgaacatttgggactcctggggccatatataagagcagaagttgaagataatatcatggtaactttcagaaatcaggcctctcgtccctattccttctattctagccttatttcttatgaggaagatcagaggcaaggagcagaacctagaaaaaactttgtcaagcctaatgaaaccaaaacttacttttggaaagtgcaacatcatatggcacccactaaagatgagtttgactgcaaagcctgggcttatttctctgatgttgacctggaaaaagatgtgcactcaggcctgattggaccccttctggtctgccacactaacacactgaaccctgctcatgggagacaagtgacagtacaggaatttgctctgtttttcaccatctttgatgagaccaaaagctggtacttcactgaaaatatggaaagaaactgcagggctccctgcaatatccagatggaagatcccacttttaaagagaattatcgcttccatgcaatcaatggctacataatggatacactacctggcttagtaatggctcaggatcaaaggattcgatggtatctgctcagcatgggcagcaatgaaaacatccattctattcatttcagtggacatgtgttcactgtacgaaaaaaagaggagtataaaatggcactgtacaatctctatccaggtgtttttgagacagtggaaatgttaccatccaaagctggaatttggcgggtggaatgccttattggcgagcatctacatgctgggatgagcacactttttctggtgtacagcaataagtgtcagactcccctgggaatggcttctggacacattagagattttcagattacagcttcaggacaatatggacagtgggccccaaagctggccagacttcattattccggatcaatcaatgcctggagcaccaaggagcccttttcttggatcaaggtggatctgttggcaccaatgattattcacggcatcaagacccagggtgcccgtcagaagttctccagcctctacatctctcagtttatcatcatgtatagtcttgatgggaagaagtggcagacttatcgaggaaattccactggaaccttaatggtcttctttggcaatgtggattcatctgggataaaacacaatatttttaaccctccaattattgctcgatacatccgtttgcacccaactcattatagcattcgcagcactcttcgcatggagttgatgggctgtgatttaaatagttgcagcatgccattgggaatggagagtaaagcaatatcagatgcacagattactgcttcatcctactttaccaatatgtttgccacctggtctccttcaaaagctcgacttcacctccaagggaggagtaatgcctggagacctcaggtgaataatccaaaagagtggctgcaagtggacttccagaagacaatgaaagtcacaggagtaactactcagggagtaaaatctctgcttaccagcatgtatgtgaaggagttcctcatctccagcagtcaagatggccatcagtggactctcttttttcagaatggcaaagtaaaggtttttcagggaaatcaagactccttcacacctgtggtgaactctctagacccaccgttactgactcgctaccttcgaattcacccccagagttgggtgcaccagattgccctgaggatggaggttctgggctgcgaggcacaggacctctacggcgccggatcacctggggccgaaacggccgaacaaaaactcatctcagaagaggatctgtcacctgcaaccggttga

SEQ ID NO: 716 - protein, 1524 aa, Artificial Sequence
  Description of Artificial Sequence: Synthetic polypeptide
MQIELSTCFFLCLLRFCFSATRRYYLGAVELSWDYMQSDLGELPVDARFPPRVPKSFPFNTSVVYKKTLFVEFTDHLFNIAKPRPPWMGLLGPTIQAEVYDTVVITLKNMASHPVSLHAVGVSYWKASEGAEYDDQTSQREKEDDKVFPGGSHTYVWQVLKENGPMASDPLCLTYSYLSHVDLVKDLNSGLIGALLVCREGSLAKEKTQTLHKFILLFAVFDEGKSWHSETKNSLGAPGSPAGSPTSTEEGTSESATPESGPGSEPATSGSETPASSMQDRDAASARAWPKMHTVNGYVNRSLPGLIGCHRKSVYWHVIGMGTTPEVHSIFLEGHTFLVRNHRQASLEISPITFLTAQTLLMDLGQFLLFCHISSHQHDGMEAYVKVDSCPEEPQLRMKNNEEAEDYDDDLTDSEMDVVRFDDDNSPSFIQIRSVAKKHPKTWVHYIAAEEEDWDYAPLVLAPDDRSYKSQYLNNGPQRIGRKYKKVRFMAYTDETFKTREAIQHESGILGPLLYGEVGDTLLIIFKNQASRPYNIYPHGITDVRPLYSRRLPKGVKHLKDFPILPGEIFKYKWTVTVEDGPTKSDPRCLTRYYSSFVNMERDLASGLIGPLLICYKESVDQRGNQIMSDKRNVILFSVFDENRSWYLTENIQRFLPNPAGVQLEDPEFQASNIMHSINGYVFDSLQLSVCLHEVAYWYILSIGAQTDFLSVFFSGYTFKHKMVYEDTLTLFPFSGETVFMSMENPGLWILGCHNSDFRNRGMTALLKVSSCDKNTGDYYEDSYEDISAYLLSKNNAIEPRSFSQNPPVLKRHQREITRTTLQSDQEEIDYDDTISVEMKKEDFDIYDEDENQSPRSFQKKTRHYFIAAVERLWDYGMSSSPHVLRNRAQSGSVPQFKKVVFQEFTDGSFTQPLYRGELNEHLGLLGPYIRAEVEDNIMVTFRNQASRPYSFYSSLISYEEDQRQGAEPRKNFVKPNETKTYFWKVQHHMAPTKDEFDCKAWAYFSDVDLEKDVHSGLIGPLLVCHTNTLNPAHGRQVTVQEFALFFTIFDETKSWYFTENMERNCRAPCNIQMEDPTFKENYRFHAINGYIMDTLPGLVMAQDQRIRWYLLSMGSNENIHSIHFSGHVFTVRKKEEYKMALYNLYPGVFETVEMLPSKAGIWRVECLIGEHLHAGMSTLFLVYSNKCQTPLGMASGHIRDFQITASGQYGQWAPKLARLHYSGSINAWSTKEPFSWIKVDLLAPMIIHGIKTQGARQKFSSLYISQFIIMYSLDGKKWQTYRGNSTGTLMVFFGNVDSSGIKHNIFNPPIIARYIRLHPTHYSIRSTLRMELMGCDLNSCSMPLGMESKAISDAQITASSYFTNMFATWSPSKARLHLQGRSNAWRPQVNNPKEWLQVDFQKTMKVTGVTTQGVKSLLTSMYVKEFLISSSQDGHQWTLFFQNGKVKVFQGNQDSFTPVVNSLDPPLLTRYLRIHPQSWVHQIALRMEVLGCEAQDLYGAGSPGAETAEQKLISEEDLSPATG

SEQ ID NO: 717 - DNA, 4575 bp, Artificial Sequence
  Description of Artificial Sequence: Synthetic polynucleotide
atgcaaatagagctctccacctgcttctttctgtgccttttgcgattctgctttagtgccaccagaagatactacctgggtgcagtggaactgtcatgggactatatgcaaagtgatctcggtgagctgcctgtggacgcaagatttcctcctagagtgccaaaatcttttccattcaacacctcagtcgtgtacaaaaagactctgtttgtagaattcacggatcaccttttcaacatcgctaagccaaggccaccctggatgggtctgctaggtcctaccatccaggctgaggtttatgatacagtggtcattacacttaagaacatggcttcccatcctgtcagtcttcatgctgttggtgtatcctactggaaagcttctgagggagctgaatatgatgatcagaccagtcaaagggagaaagaagatgataaagtcttccctggtggaagccatacatatgtctggcaggtcctgaaagagaatggtccaatggcctctgacccactgtgccttacctactcatatctttctcatgtggacctggtaaaagacttgaattcaggcctcattggagccctactagtatgtagagaagggagtctggccaaggaaaagacacagaccttgcacaaatttatactactttttgctgtatttgatgaagggaaaagttggcactcagaaacaaagaactccttgggcgcgccaggttctcctgctggctcccccacctcaacagaagaggggacaagcgaaagcgctacgcctgagagtggccctggctctgagccagccacctccggctctgaaacccctgcctcgagcatgcaggatagggatgctgcatctgctcgggcctggcctaaaatgcacacagtcaatggttatgtaaacaggtctctgccaggtctgattggatgccacaggaaatcagtctattggcatgtgattggaatgggcaccactcctgaagtgcactcaatattcctcgaaggtcacacatttcttgtgaggaaccatcgccaggctagcttggaaatctcgccaataactttccttactgctcaaacactcttgatggaccttggacagtttctactgttttgtcatatctcttcccaccaacatgatggcatggaagcttatgtcaaagtagacagctgtccagaggaaccccaactacgaatgaaaaataatgaagaagcggaagactatgatgatgatcttactgattctgaaatggatgtggtcaggtttgatgatgacaactctccttcctttatccaaattcgctcagttgccaagaagcatcctaaaacttgggtacattacattgctgctgaagaggaggactgggactatgctcccttagtcctcgcccccgatgacagaagttataaaagtcaatatttgaacaatggccctcagcggattggtaggaagtacaaaaaagtccgatttatggcatacacagatgaaacctttaagactcgtgaagctattcagcatgaatcaggaatcttgggacctttactttatggggaagttggagacacactgttgattatatttaagaatcaagcaagcagaccatataacatctaccctcacggaatcactgatgtccgtcctttgtattcaaggagattaccaaaaggtgtaaaacatttgaaggattttccaattctgccaggagaaatattcaaatataaatggacagtgactgtagaagatgggccaactaaatcagatcctcggtgcctgacccgctattactctagtttcgttaatatggagagagatctagcttcaggactcattggccctctcctcatctgctacaaagaatctgtagatcaaagaggaaaccagataatgtcagacaagaggaatgtcatcctgttttctgtatttgatgagaaccgaagctggtacctcacagagaatatacaacgctttctccccaatccagctggagtgcagcttgaggatccagagttccaagcctccaacatcatgcacagcatcaatggctatgtttttgatagtttgcagttgtcagtttgtttgcatgaggtggcatactggtacattctaagcattggagcacagactgacttcctttctgtcttcttctctggatataccttcaaacacaaaatggtctatgaagacacactcaccctattcccattctcaggagaaactgtcttcatgtcgatggaaaacccaggtctatggattctggggtgccacaactcagactttcggaacagaggcatgaccgccttactgaaggtttctagttgtgacaagaacactggtgattattacgaggacagttatgaagatatttcagcatacttgctgagtaaaaacaatgccattgaaccaagaagcttctctcaaaacccaccagtcttgaaacgccatcaacgggaaataactcgtactactcttcagtcagatcaagaggaaatcgattatgatgataccatatcagttgaaatgaagaaggaagattttgacatttatgatgaggatgaaaatcagagcccccgcagctttcaaaagaaaacacgacactattttattgctgcagtggagaggctctgggattatgggatgagtagctccccacatgttctaagaaacagggctcagagtggcagtgtccctcagttcaagaaagttgttttccaggaatttactgatggctcctttactcagcccttataccgtggagaactaaatgaacatttgggactcctggggccatatataagagcagaagttgaagataatatcatggtaactttcagaaatcaggcctctcgtccctattccttctattctagccttatttcttatgaggaagatcagaggcaaggagcagaacctagaaaaaactttgtcaagcctaatgaaaccaaaacttacttttggaaagtgcaacatcatatggcacccactaaagatgagtttgactgcaaagcctgggcttatttctctgatgttgacctggaaaaagatgtgcactcaggcctgattggaccccttctggtctgccacactaacacactgaaccctgctcatgggagacaagtgacagtacaggaatttgctctgtttttcaccatctttgatgagaccaaaagctggtacttcactgaaaatatggaaagaaactgcagggctccctgcaatatccagatggaagatcccacttttaaagagaattatcgcttccatgcaatcaatggctacataatggatacactacctggcttagtaatggctcaggatcaaaggattcgatggtatctgctcagcatgggcagcaatgaaaacatccattctattcatttcagtggacatgtgttcactgtacgaaaaaaagaggagtataaaatggcactgtacaatctctatccaggtgtttttgagacagtggaaatgttaccatccaaagctggaatttggcgggtggaatgccttattggcgagcatctacatgctgggatgagcacactttttctggtgtacagcaataagtgtcagactcccctgggaatggcttctggacacattagagattttcagattacagcttcaggacaatatggacagtgggccccaaagctggccagacttcattattccggatcaatcaatgcctggagcaccaaggagcccttttcttggatcaaggtggatctgttggcaccaatgattattcacggcatcaagacccagggtgcccgtcagaagttctccagcctctacatctctcagtttatcatcatgtatagtcttgatgggaagaagtggcagacttatcgaggaaattccactggaaccttaatggtcttctttggcaatgtggattcatctgggataaaacacaatatttttaaccctccaattattgctcgatacatccgtttgcacccaactcattatagcattcgcagcactcttcgcatggagttgatgggctgtgatttaaatagttgcagcatgccattgggaatggagagtaaagcaatatcagatgcacagattactgcttcatcctactttaccaatatgtttgccacctggtctccttcaaaagctcgacttcacctccaagggaggagtaatgcctggagacctcaggtgaataatccaaaagagtggctgcaagtggacttccagaagacaatgaaagtcacaggagtaactactcagggagtaaaatctctgcttaccagcatgtatgtgaaggagttcctcatctccagcagtcaagatggccatcagtggactctcttttttcagaatggcaaagtaaaggtttttcagggaaatcaagactccttcacacctgtggtgaactctctagacccaccgttactgactcgctaccttcgaattcacccccagagttgggtgcaccagattgccctgaggatggaggttctgggctgcgaggcacaggacctctacggcgccggatcacctggggccgaaacggccgaacaaaaactcatctcagaagaggatctgtcacctgcaaccggttga

SEQ ID NO: 718 - protein, 1524 aa, Artificial Sequence
  Description of Artificial Sequence: Synthetic polypeptide
MQIELSTCFFLCLLRFCFSATRRYYLGAVELSWDYMQSDLGELPVDARFPPRVPKSFPFNTSVVYKKTLFVEFTDHLFNIAKPRPPWMGLLGPTIQAEVYDTVVITLKNMASHPVSLHAVGVSYWKASEGAEYDDQTSQREKEDDKVFPGGSHTYVWQVLKENGPMASDPLCLTYSYLSHVDLVKDLNSGLIGALLVCREGSLAKEKTQTLHKFILLFAVFDEGKSWHSETKNSLMQDRDAASARAWPKGAPGSPAGSPTSTEEGTSESATPESGPGSEPATSGSETPASSMHTVNGYVNRSLPGLIGCHRKSVYWHVIGMGTTPEVHSIFLEGHTFLVRNHRQASLEISPITFLTAQTLLMDLGQFLLFCHISSHQHDGMEAYVKVDSCPEEPQLRMKNNEEAEDYDDDLTDSEMDVVRFDDDNSPSFIQIRSVAKKHPKTWVHYIAAEEEDWDYAPLVLAPDDRSYKSQYLNNGPQRIGRKYKKVRFMAYTDETFKTREAIQHESGILGPLLYGEVGDTLLIIFKNQASRPYNIYPHGITDVRPLYSRRLPKGVKHLKDFPILPGEIFKYKWTVTVEDGPTKSDPRCLTRYYSSFVNMERDLASGLIGPLLICYKESVDQRGNQIMSDKRNVILFSVFDENRSWYLTENIQRFLPNPAGVQLEDPEFQASNIMHSINGYVFDSLQLSVCLHEVAYWYILSIGAQTDFLSVFFSGYTFKHKMVYEDTLTLFPFSGETVFMSMENPGLWILGCHNSDFRNRGMTALLKVSSCDKNTGDYYEDSYEDISAYLLSKNNAIEPRSFSQNPPVLKRHQREITRTTLQSDQEEIDYDDTISVEMKKEDFDIYDEDENQSPRSFQKKTRHYFIAAVERLWDYGMSSSPHVLRNRAQSGSVPQFKKVVFQEFTDGSFTQPLYRGELNEHLGLLGPYIRAEVEDNIMVTFRNQASRPYSFYSSLISYEEDQRQGAEPRKNFVKPNETKTYFWKVQHHMAPTKDEFDCKAWAYFSDVDLEKDVHSGLIGPLLVCHTNTLNPAHGRQVTVQEFALFFTIFDETKSWYFTENMERNCRAPCNIQMEDPTFKENYRFHAINGYIMDTLPGLVMAQDQRIRWYLLSMGSNENIHSIHFSGHVFTVRKKEEYKMALYNLYPGVFETVEMLPSKAGIWRVECLIGEHLHAGMSTLFLVYSNKCQTPLGMASGHIRDFQITASGQYGQWAPKLARLHYSGSINAWSTKEPFSWIKVDLLAPMIIHGIKTQGARQKFSSLYISQFIIMYSLDGKKWQTYRGNSTGTLMVFFGNVDSSGIKHNIFNPPIIARYIRLHPTHYSIRSTLRMELMGCDLNSCSMPLGMESKAISDAQITASSYFTNMFATWSPSKARLHLQGRSNAWRPQVNNPKEWLQVDFQKTMKVTGVTTQGVKSLLTSMYVKEFLISSSQDGHQWTLFFQNGKVKVFQGNQDSFTPVVNSLDPPLLTRYLRIHPQSWVHQIALRMEVLGCEAQDLYGAGSPGAETAEQKLISEEDLSPATG

SEQ ID NO: 719 - DNA, 4575 bp, Artificial Sequence
  Description of Artificial Sequence: Synthetic polynucleotide
atgcaaatagagctctccacctgcttctttctgtgccttttgcgattctgctttagtgccaccagaagatactacctgggtgcagtggaactgtcatgggactatatgcaaagtgatctcggtgagctgcctgtggacgcaagatttcctcctagagtgccaaaatcttttccattcaacacctcagtcgtgtacaaaaagactctgtttgtagaattcacggatcaccttttcaacatcgctaagccaaggccaccctggatgggtctgctaggtcctaccatccaggctgaggtttatgatacagtggtcattacacttaagaacatggcttcccatcctgtcagtcttcatgctgttggtgtatcctactggaaagcttctgagggagctgaatatgatgatcagaccagtcaaagggagaaagaagatgataaagtcttccctggtggaagccatacatatgtctggcaggtcctgaaagagaatggtccaatggcctctgacccactgtgccttacctactcatatctttctcatgtggacctggtaaaagacttgaattcaggcctcattggagccctactagtatgtagagaagggagtctggccaaggaaaagacacagaccttgcacaaatttatactactttttgctgtatttgatgaagggaaaagttggcactcagaaacaaagaactccttgatgcaggatagggatgctgcatctgctcgggcctggcctaaaggcgcgccaggttctcctgctggctcccccacctcaacagaagaggggacaagcgaaagcgctacgcctgagagtggccctggctctgagccagccacctccggctctgaaacccctgcctcgagcatgcacacagtcaatggttatgtaaacaggtctctgccaggtctgattggatgccacaggaaatcagtctattggcatgtgattggaatgggcaccactcctgaagtgcactcaatattcctcgaaggtcacacatttcttgtgaggaaccatcgccaggctagcttggaaatctcgccaataactttccttactgctcaaacactcttgatggaccttggacagtttctactgttttgtcatatctcttcccaccaacatgatggcatggaagcttatgtcaaagtagacagctgtccagaggaaccccaactacgaatgaaaaataatgaagaagcggaagactatgatgatgatcttactgattctgaaatggatgtggtcaggtttgatgatgacaactctccttcctttatccaaattcgctcagttgccaagaagcatcctaaaacttgggtacattacattgctgctgaagaggaggactgggactatgctcccttagtcctcgcccccgatgacagaagttataaaagtcaatatttgaacaatggccctcagcggattggtaggaagtacaaaaaagtccgatttatggcatacacagatgaaacctttaagactcgtgaagctattcagcatgaatcaggaatcttgggacctttactttatggggaagttggagacacactgttgattatatttaagaatcaagcaagcagaccatataacatctaccctcacggaatcactgatgtccgtcctttgtattcaaggagattaccaaaaggtgtaaaacatttgaaggattttccaattctgccaggagaaatattcaaatataaatggacagtgactgtagaagatgggccaactaaatcagatcctcggtgcctgacccgctattactctagtttcgttaatatggagagagatctagcttcaggactcattggccctctcctcatctgctacaaagaatctgtagatcaaagaggaaaccagataatgtcagacaagaggaatgtcatcctgttttctgtatttgatgagaaccgaagctggtacctcacagagaatatacaacgctttctccccaatccagctggagtgcagcttgaggatccagagttccaagcctccaacatcatgcacagcatcaatggctatgtttttgatagtttgcagttgtcagtttgtttgcatgaggtggcatactggtacattctaagcattggagcacagactgacttcctttctgtcttcttctctggatataccttcaaacacaaaatggtctatgaagacacactcaccctattcccattctcaggagaaactgtcttcatgtcgatggaaaacccaggtctatggattctggggtgccacaactcagactttcggaacagaggcatgaccgccttactgaaggtttctagttgtgacaagaacactggtgattattacgaggacagttatgaagatatttcagcatacttgctgagtaaaaacaatgccattgaaccaagaagcttctctcaaaacccaccagtcttgaaacgccatcaacgggaaataactcgtactactcttcagtcagatcaagaggaaatcgattatgatgataccatatcagttgaaatgaagaaggaagattttgacatttatgatgaggatgaaaatcagagcccccgcagctttcaaaagaaaacacgacactattttattgctgcagtggagaggctctgggattatgggatgagtagctccccacatgttctaagaaacagggctcagagtggcagtgtccctcagttcaagaaagttgttttccaggaatttactgatggctcctttactcagcccttataccgtggagaactaaatgaacatttgggactcctggggccatatataagagcagaagttgaagataatatcatggtaactttcagaaatcaggcctctcgtccctattccttctattctagccttatttcttatgaggaagatcagaggcaaggagcagaacctagaaaaaactttgtcaagcctaatgaaaccaaaacttacttttggaaagtgcaacatcatatggcacccactaaagatgagtttgactgcaaagcctgggcttatttctctgatgttgacctggaaaaagatgtgcactcaggcctgattggaccccttctggtctgccacactaacacactgaaccctgctcatgggagacaagtgacagtacaggaatttgctctgtttttcaccatctttgatgagaccaaaagctggtacttcactgaaaatatggaaagaaactgcagggctccctgcaatatccagatggaagatcccacttttaaagagaattatcgcttccatgcaatcaatggctacataatggatacactacctggcttagtaatggctcaggatcaaaggattcgatggtatctgctcagcatgggcagcaatgaaaacatccattctattcatttcagtggacatgtgttcactgtacgaaaaaaagaggagtataaaatggcactgtacaatctctatccaggtgtttttgagacagtggaaatgttaccatccaaagctggaatttggcgggtggaatgccttattggcgagcatctacatgctgggatgagcacactttttctggtgtacagcaataagtgtcagactcccctgggaatggcttctggacacattagagattttcagattacagcttcaggacaatatggacagtgggccccaaagctggccagacttcattattccggatcaatcaatgcctggagcaccaaggagcccttttcttggatcaaggtggatctgttggcaccaatgattattcacggcatcaagacccagggtgcccgtcagaagttctccagcctctacatctctcagtttatcatcatgtatagtcttgatgggaagaagtggcagacttatcgaggaaattccactggaaccttaatggtcttctttggcaatgtggattcatctgggataaaacacaatatttttaaccctccaattattgctcgatacatccgtttgcacccaactcattatagcattcgcagcactcttcgcatggagttgatgggctgtgatttaaatagttgcagcatgccattgggaatggagagtaaagcaatatcagatgcacagattactgcttcatcctactttaccaatatgtttgccacctggtctccttcaaaagctcgacttcacctccaagggaggagtaatgcctggagacctcaggtgaataatccaaaagagtggctgcaagtggacttccagaagacaatgaaagtcacaggagtaactactcagggagtaaaatctctgcttaccagcatgtatgtgaaggagttcctcatctccagcagtcaagatggccatcagtggactctcttttttcagaatggcaaagtaaaggtttttcagggaaatcaagactccttcacacctgtggtgaactctctagacccaccgttactgactcgctaccttcgaattcacccccagagttgggtgcaccagattgccctgaggatggaggttctgggctgcgaggcacaggacctctacggcgccggatcacctggggccgaaacggccgaacaaaaactcatctcagaagaggatctgtcacctgcaaccggttga

SEQ ID NO: 720 - protein, 1527 aa, Artificial Sequence
  Description of Artificial Sequence: Synthetic polypeptide
MQIELSTCFFLCLLRFCFSATRRYYLGAVELSWDYMQSDLGELPVDARFPPRVPKSFPFNTSVVYKKTLFVEFTDHLFNIAKPRPPWMGLLGPTIQAEVYDTVVITLKNMASHPVSLHAVGVSYWKASEGAEYDDQTSQREKEDDKVFPGGSHTYVWQVLKENGPMASDPLCLTYSYLSHVDLVKDLNSGLIGALLVCREGSLAKEKTQTLHKFILLFAVFDEGKSWHSETKNSLMQDRDAASARAWPKMHTVNGYVNRSLPGLIGCHRKSVYWHVIGMGTTPEVHSIFLEGHTFLVRNHRQASLEISPITFLTAQTLLMDLGQFLLFCHISSHQHDGMEAYVKVDSCPEEPGAPGSPAGSPTSTEEGTSESATPESGPGSEPATSGSETPASSVQLQLRMKNNEEAEDYDDDLTDSEMDVVRFDDDNSPSFIQIRSVAKKHPKTWVHYIAAEEEDWDYAPLVLAPDDRSYKSQYLNNGPQRIGRKYKKVRFMAYTDETFKTREAIQHESGILGPLLYGEVGDTLLIIFKNQASRPYNIYPHGITDVRPLYSRRLPKGVKHLKDFPILPGEIFKYKWTVTVEDGPTKSDPRCLTRYYSSFVNMERDLASGLIGPLLICYKESVDQRGNQIMSDKRNVILFSVFDENRSWYLTENIQRFLPNPAGVQLEDPEFQASNIMHSINGYVFDSLQLSVCLHEVAYWYILSIGAQTDFLSVFFSGYTFKHKMVYEDTLTLFPFSGETVFMSMENPGLWILGCHNSDFRNRGMTALLKVSSCDKNTGDYYEDSYEDISAYLLSKNNAIEPRSFSQNPPVLKRHQREITRTTLQSDQEEIDYDDTISVEMKKEDFDIYDEDENQSPRSFQKKTRHYFIAAVERLWDYGMSSSPHVLRNRAQSGSVPQFKKVVFQEFTDGSFTQPLYRGELNEHLGLLGPYIRAEVEDNIMVTFRNQASRPYSFYSSLISYEEDQRQGAEPRKNFVKPNETKTYFWKVQHHMAPTKDEFDCKAWAYFSDVDLEKDVHSGLIGPLLVCHTNTLNPAHGRQVTVQEFALFFTIFDETKSWYFTENMERNCRAPCNIQMEDPTFKENYRFHAINGYIMDTLPGLVMAQDQRIRWYLLSMGSNENIHSIHFSGHVFTVRKKEEYKMALYNLYPGVFETVEMLPSKAGIWRVECLIGEHLHAGMSTLFLVYSNKCQTPLGMASGHIRDFQITASGQYGQWAPKLARLHYSGSINAWSTKEPFSWIKVDLLAPMIIHGIKTQGARQKFSSLYISQFIIMYSLDGKKWQTYRGNSTGTLMVFFGNVDSSGIKHNIFNPPIIARYIRLHPTHYSIRSTLRMELMGCDLNSCSMPLGMESKAISDAQITASSYFTNMFATWSPSKARLHLQGRSNAWRPQVNNPKEWLQVDFQKTMKVTGVTTQGVKSLLTSMYVKEFLISSSQDGHQWTLFFQNGKVKVFQGNQDSFTPVVNSLDPPLLTRYLRIHPQSWVHQIALRMEVLGCEAQDLYGAGSPGAETAEQKLISEEDLSPATG

SEQ ID NO: 721 - DNA, 4584 bp, Artificial Sequence
  Description of Artificial Sequence: Synthetic polynucleotide
atgcaaatagagctctccacctgcttctttctgtgccttttgcgattctgctttagtgccaccagaagatactacctgggtgcagtggaactgtcatgggactatatgcaaagtgatctcggtgagctgcctgtggacgcaagatttcctcctagagtgccaaaatcttttccattcaacacctcagtcgtgtacaaaaagactctgtttgtagaattcacggatcaccttttcaacatcgctaagccaaggccaccctggatgggtctgctaggtcctaccatccaggctgaggtttatgatacagtggtcattacacttaagaacatggcttcccatcctgtcagtcttcatgctgttggtgtatcctactggaaagcttctgagggagctgaatatgatgatcagaccagtcaaagggagaaagaagatgataaagtcttccctggtggaagccatacatatgtctggcaggtcctgaaagagaatggtccaatggcctctgacccactgtgccttacctactcatatctttctcatgtggacctggtaaaagacttgaattcaggcctcattggagccctactagtatgtagagaagggagtctggccaaggaaaagacacagaccttgcacaaatttatactactttttgctgtatttgatgaagggaaaagttggcactcagaaacaaagaactccttgatgcaggatagggatgctgcatctgctcgggcctggcctaaaatgcacacagtcaatggttatgtaaacaggtctctgccaggtctgattggatgccacaggaaatcagtctattggcatgtgattggaatgggcaccactcctgaagtgcactcaatattcctcgaaggtcacacatttcttgtgaggaaccatcgccaggctagcttggaaatctcgccaataactttccttactgctcaaacactcttgatggaccttggacagtttctactgttttgtcatatctcttcccaccaacatgatggcatggaagcttatgtcaaagtagacagctgtccagaggaacccggcgcgccaggttctcctgctggctcccccacctcaacagaagaggggacaagcgaaagcgctacgcctgagagtggccctggctctgagccagccacctccggctctgaaacccctgcctcgagcgtgcaacttcaactacgaatgaaaaataatgaagaagcggaagactatgatgatgatcttactgattctgaaatggatgtggtcaggtttgatgatgacaactctccttcctttatccaaattcgctcagttgccaagaagcatcctaaaacttgggtacattacattgctgctgaagaggaggactgggactatgctcccttagtcctcgcccccgatgacagaagttataaaagtcaatatttgaacaatggccctcagcggattggtaggaagtacaaaaaagtccgatttatggcatacacagatgaaacctttaagactcgtgaagctattcagcatgaatcaggaatcttgggacctttactttatggggaagttggagacacactgttgattatatttaagaatcaagcaagcagaccatataacatctaccctcacggaatcactgatgtccgtcctttgtattcaaggagattaccaaaaggtgtaaaacatttgaaggattttccaattctgccaggagaaatattcaaatataaatggacagtgactgtagaagatgggccaactaaatcagatcctcggtgcctgacccgctattactctagtttcgttaatatggagagagatctagcttcaggactcattggccctctcctcatctgctacaaagaatctgtagatcaaagaggaaaccagataatgtcagacaagaggaatgtcatcctgttttctgtatttgatgagaaccgaagctggtacctcacagagaatatacaacgctttctccccaatccagctggagtgcagcttgaggatccagagttccaagcctccaacatcatgcacagcatcaatggctatgtttttgatagtttgcagttgtcagtttgtttgcatgaggtggcatactggtacattctaagcattggagcacagactgacttcctttctgtcttcttctctggatataccttcaaacacaaaatggtctatgaagacacactcaccctattcccattctcaggagaaactgtcttcatgtcgatggaaaacccaggtctatggattctggggtgccacaactcagactttcggaacagaggcatgaccgccttactgaaggtttctagttgtgacaagaacactggtgattattacgaggacagttatgaagatatttcagcatacttgctgagtaaaaacaatgccattgaaccaagaagcttctctcaaaacccaccagtcttgaaacgccatcaacgggaaataactcgtactactcttcagtcagatcaagaggaaatcgattatgatgataccatatcagttgaaatgaagaaggaagattttgacatttatgatgaggatgaaaatcagagcccccgcagctttcaaaagaaaacacgacactattttattgctgcagtggagaggctctgggattatgggatgagtagctccccacatgttctaagaaacagggctcagagtggcagtgtccctcagttcaagaaagttgttttccaggaatttactgatggctcctttactcagcccttataccgtggagaactaaatgaacatttgggactcctggggccatatataagagcagaagttgaagataatatcatggtaactttcagaaatcaggcctctcgtccctattccttctattctagccttatttcttatgaggaagatcagaggcaaggagcagaacctagaaaaaactttgtcaagcctaatgaaaccaaaacttacttttggaaagtgcaacatcatatggcacccactaaagatgagtttgactgcaaagcctgggcttatttctctgatgttgacctggaaaaagatgtgcactcaggcctgattggaccccttctggtctgccacactaacacactgaaccctgctcatgggagacaagtgacagtacaggaatttgctctgtttttcaccatctttgatgagaccaaaagctggtacttcactgaaaatatggaaagaaactgcagggctccctgcaatatccagatggaagatcccacttttaaagagaattatcgcttccatgcaatcaatggctacataatggatacactacctggcttagtaatggctcaggatcaaaggattcgatggtatctgctcagcatgggcagcaatgaaaacatccattctattcatttcagtggacatgtgttcactgtacgaaaaaaagaggagtataaaatggcactgtacaatctctatccaggtgtttttgagacagtggaaatgttaccatccaaagctggaatttggcgggtggaatgccttattggcgagcatctacatgctgggatgagcacactttttctggtgtacagcaataagtgtcagactcccctgggaatggcttctggacacattagagattttcagattacagcttcaggacaatatggacagtgggccccaaagctggccagacttcattattccggatcaatcaatgcctggagcaccaaggagcccttttcttggatcaaggtggatctgttggcaccaatgattattcacggcatcaagacccagggtgcccgtcagaagttctccagcctctacatctctcagtttatcatcatgtatagtcttgatgggaagaagtggcagacttatcgaggaaattccactggaaccttaatggtcttctttggcaatgtggattcatctgggataaaacacaatatttttaaccctccaattattgctcgatacatccgtttgcacccaactcattatagcattcgcagcactcttcgcatggagttgatgggctgtgatttaaatagttgcagcatgccattgggaatggagagtaaagcaatatcagatgcacagattactgcttcatcctactttaccaatatgtttgccacctggtctccttcaaaagctcgacttcacctccaagggaggagtaatgcctggagacctcaggtgaataatccaaaagagtggctgcaagtggacttccagaagacaatgaaagtcacaggagtaactactcagggagtaaaatctctgcttaccagcatgtatgtgaaggagttcctcatctccagcagtcaagatggccatcagtggactctcttttttcagaatggcaaagtaaaggtttttcagggaaatcaagactccttcacacctgtggtgaactctctagacccaccgttactgactcgctaccttcgaattcacccccagagttgggtgcaccagattgccctgaggatggaggttctgggctgcgaggcacaggacctctacggcgccggatcacctggggccgaaacggccgaacaaaaactcatctcagaagaggatctgtcacctgcaaccggttga

SEQ ID NO: 722 - protein, 1527 aa, Artificial Sequence
  Description of Artificial Sequence: Synthetic polypeptide
MQIELSTCFFLCLLRFCFSATRRYYLGAVELSWDYMQSDLGELPVDARFPPRVPKSFPFNTSVVYKKTLFVEFTDHLFNIAKPRPPWMGLLGPTIQAEVYDTVVITLKNMASHPVSLHAVGVSYWKASEGAEYDDQTSQREKEDDKVFPGGSHTYVWQVLKENGPMASDPLCLTYSYLSHVDLVKDLNSGLIGALLVCREGSLAKEKTQTLHKFILLFAVFDEGKSWHSETKNSLMQDRDAASARAWPKMHTVNGYVNRSLPGLIGCHRKSVYWHVIGMGTTPEVHSIFLEGHTFLVRNHRQASLEISPITFLTAQTLLMDLGQFLLFCHISSHQHDGMEAYVKVDSCPEEPQLRMKNNEEAEDYDDDLTDSEMDVVRFDDDNSPSFIQIRSVASVAGAPGSPAGSPTSTEEGTSESATPESGPGSEPATSGSETPASSKKHPKTWVHYIAAEEEDWDYAPLVLAPDDRSYKSQYLNNGPQRIGRKYKKVRFMAYTDETFKTREAIQHESGILGPLLYGEVGDTLLIIFKNQASRPYNIYPHGITDVRPLYSRRLPKGVKHLKDFPILPGEIFKYKWTVTVEDGPTKSDPRCLTRYYSSFVNMERDLASGLIGPLLICYKESVDQRGNQIMSDKRNVILFSVFDENRSWYLTENIQRFLPNPAGVQLEDPEFQASNIMHSINGYVFDSLQLSVCLHEVAYWYILSIGAQTDFLSVFFSGYTFKHKMVYEDTLTLFPFSGETVFMSMENPGLWILGCHNSDFRNRGMTALLKVSSCDKNTGDYYEDSYEDISAYLLSKNNAIEPRSFSQNPPVLKRHQREITRTTLQSDQEEIDYDDTISVEMKKEDFDIYDEDENQSPRSFQKKTRHYFIAAVERLWDYGMSSSPHVLRNRAQSGSVPQFKKVVFQEFTDGSFTQPLYRGELNEHLGLLGPYIRAEVEDNIMVTFRNQASRPYSFYSSLISYEEDQRQGAEPRKNFVKPNETKTYFWKVQHHMAPTKDEFDCKAWAYFSDVDLEKDVHSGLIGPLLVCHTNTLNPAHGRQVTVQEFALFFTIFDETKSWYFTENMERNCRAPCNIQMEDPTFKENYRFHAINGYIMDTLPGLVMAQDQRIRWYLLSMGSNENIHSIHFSGHVFTVRKKEEYKMALYNLYPGVFETVEMLPSKAGIWRVECLIGEHLHAGMSTLFLVYSNKCQTPLGMASGHIRDFQITASGQYGQWAPKLARLHYSGSINAWSTKEPFSWIKVDLLAPMIIHGIKTQGARQKFSSLYISQFIIMYSLDGKKWQTYRGNSTGTLMVFFGNVDSSGIKHNIFNPPIIARYIRLHPTHYSIRSTLRMELMGCDLNSCSMPLGMESKAISDAQITASSYFTNMFATWSPSKARLHLQGRSNAWRPQVNNPKEWLQVDFQKTMKVTGVTTQGVKSLLTSMYVKEFLISSSQDGHQWTLFFQNGKVKVFQGNQDSFTPVVNSLDPPLLTRYLRIHPQSWVHQIALRMEVLGCEAQDLYGAGSPGAETAEQKLISEEDLSPATG

SEQ ID NO: 723 - DNA, 4584 bp, Artificial Sequence
  Description of Artificial Sequence: Synthetic polynucleotide
atgcaaatagagctctccacctgcttctttctgtgccttttgcgattctgctttagtgccaccagaagatactacctgggtgcagtggaactgtcatgggactatatgcaaagtgatctcggtgagctgcctgtggacgcaagatttcctcctagagtgccaaaatcttttccattcaacacctcagtcgtgtacaaaaagactctgtttgtagaattcacggatcaccttttcaacatcgctaagccaaggccaccctggatgggtctgctaggtcctaccatccaggctgaggtttatgatacagtggtcattacacttaagaacatggcttcccatcctgtcagtcttcatgctgttggtgtatcctactggaaagcttctgagggagctgaatatgatgatcagaccagtcaaagggagaaagaagatgataaagtcttccctggtggaagccatacatatgtctggcaggtcctgaaagagaatggtccaatggcctctgacccactgtgccttacctactcatatctttctcatgtggacctggtaaaagacttgaattcaggcctcattggagccctactagtatgtagagaagggagtctggccaaggaaaagacacagaccttgcacaaatttatactactttttgctgtatttgatgaagggaaaagttggcactcagaaacaaagaactccttgatgcaggatagggatgctgcatctgctcgggcctggcctaaaatgcacacagtcaatggttatgtaaacaggtctctgccaggtctgattggatgccacaggaaatcagtctattggcatgtgattggaatgggcaccactcctgaagtgcactcaatattcctcgaaggtcacacatttcttgtgaggaaccatcgccaggctagcttggaaatctcgccaataactttccttactgctcaaacactcttgatggaccttggacagtttctactgttttgtcatatctcttcccaccaacatgatggcatggaagcttatgtcaaagtagacagctgtccagaggaaccccaactacgaatgaaaaataatgaagaagcggaagactatgatgatgatcttactgattctgaaatggatgtggtcaggtttgatgatgacaactctccttcctttatccaaattcgctcagttgcctctgtagcaggcgcgccaggttctcctgctggctcccccacctcaacagaagaggggacaagcgaaagcgctacgcctgagagtggccctggctctgagccagccacctccggctctgaaacccctgcctcgagcaagaagcatcctaaaacttgggtacattacattgctgctgaagaggaggactgggactatgctcccttagtcctcgcccccgatgacagaagttataaaagtcaatatttgaacaatggccctcagcggattggtaggaagtacaaaaaagtccgatttatggcatacacagatgaaacctttaagactcgtgaagctattcagcatgaatcaggaatcttgggacctttactttatggggaagttggagacacactgttgattatatttaagaatcaagcaagcagaccatataacatctaccctcacggaatcactgatgtccgtcctttgtattcaaggagattaccaaaaggtgtaaaacatttgaaggattttccaattctgccaggagaaatattcaaatataaatggacagtgactgtagaagatgggccaactaaatcagatcctcggtgcctgacccgctattactctagtttcgttaatatggagagagatctagcttcaggactcattggccctctcctcatctgctacaaagaatctgtagatcaaagaggaaaccagataatgtcagacaagaggaatgtcatcctgttttctgtatttgatgagaaccgaagctggtacctcacagagaatatacaacgctttctccccaatccagctggagtgcagcttgaggatccagagttccaagcctccaacatcatgcacagcatcaatggctatgtttttgatagtttgcagttgtcagtttgtttgcatgaggtggcatactggtacattctaagcattggagcacagactgacttcctttctgtcttcttctctggatataccttcaaacacaaaatggtctatgaagacacactcaccctattcccattctcaggagaaactgtcttcatgtcgatggaaaacccaggtctatggattctggggtgccacaactcagactttcggaacagaggcatgaccgccttactgaaggtttctagttgtgacaagaacactggtgattattacgaggacagttatgaagatatttcagcatacttgctgagtaaaaacaatgccattgaaccaagaagcttctctcaaaacccaccagtcttgaaacgccatcaacgggaaataactcgtactactcttcagtcagatcaagaggaaatcgattatgatgataccatatcagttgaaatgaagaaggaagattttgacatttatgatgaggatgaaaatcagagcccccgcagctttcaaaagaaaacacgacactattttattgctgcagtggagaggctctgggattatgggatgagtagctccccacatgttctaagaaacagggctcagagtggcagtgtccctcagttcaagaaagttgttttccaggaatttactgatggctcctttactcagcccttataccgtggagaactaaatgaacatttgggactcctggggccatatataagagcagaagttgaagataatatcatggtaactttcagaaatcaggcctctcgtccctattccttctattctagccttatttcttatgaggaagatcagaggcaaggagcagaacctagaaaaaactttgtcaagcctaatgaaaccaaaacttacttttggaaagtgcaacatcatatggcacccactaaagatgagtttgactgcaaagcctgggcttatttctctgatgttgacctggaaaaagatgtgcactcaggcctgattggaccccttctggtctgccacactaacacactgaaccctgctcatgggagacaagtgacagtacaggaatttgctctgtttttcaccatctttgatgagaccaaaagctggtacttcactgaaaatatggaaagaaactgcagggctccctgcaatatccagatggaagatcccacttttaaagagaattatcgcttccatgcaatcaatggctacataatggatacactacctggcttagtaatggctcaggatcaaaggattcgatggtatctgctcagcatgggcagcaatgaaaacatccattctattcatttcagtggacatgtgttcactgtacgaaaaaaagaggagtataaaatggcactgtacaatctctatccaggtgtttttgagacagtggaaatgttaccatccaaagctggaatttggcgggtggaatgccttattggcgagcatctacatgctgggatgagcacactttttctggtgtacagcaataagtgtcagactcccctgggaatggcttctggacacattagagattttcagattacagcttcaggacaatatggacagtgggccccaaagctggccagacttcattattccggatcaatcaatgcctggagcaccaaggagcccttttcttggatcaaggtggatctgttggcaccaatgattattcacggcatcaagacccagggtgcccgtcagaagttctccagcctctacatctctcagtttatcatcatgtatagtcttgatgggaagaagtggcagacttatcgaggaaattccactggaaccttaatggtcttctttggcaatgtggattcatctgggataaaacacaatatttttaaccctccaattattgctcgatacatccgtttgcacccaactcattatagcattcgcagcactcttcgcatggagttgatgggctgtgatttaaatagttgcagcatgccattgggaatggagagtaaagcaatatcagatgcacagattactgcttcatcctactttaccaatatgtttgccacctggtctccttcaaaagctcgacttcacctccaagggaggagtaatgcctggagacctcaggtgaataatccaaaagagtggctgcaagtggacttccagaagacaatgaaagtcacaggagtaactactcagggagtaaaatctctgcttaccagcatgtatgtgaaggagttcctcatctccagcagtcaagatggccatcagtggactctcttttttcagaatggcaaagtaaaggtttttcagggaaatcaagactccttcacacctgtggtgaactctctagacccaccgttactgactcgctaccttcgaattcacccccagagttgggtgcaccagattgccctgaggatggaggttctgggctgcgaggcacaggacctctacggcgccggatcacctggggccgaaacggccgaacaaaaactcatctcagaagaggatctgtcacctgcaaccggttga

SEQ ID NO: 724 - protein, 1524 aa, Artificial Sequence
  Description of Artificial Sequence: Synthetic polypeptide
MQIELSTCFFLCLLRFCFSATRRYYLGAVELSWDYMQSDLGELPVDARFPPRVPKSFPFNTSVVYKKTLFVEFTDHLFNIAKPRPPWMGLLGPTIQAEVYDTVVITLKNMASHPVSLHAVGVSYWKASEGAEYDDQTSQREKEDDKVFPGGSHTYVWQVLKENGPMASDPLCLTYSYLSHVDLVKDLNSGLIGALLVCREGSLAKEKTQTLHKFILLFAVFDEGKSWHSETKNSLMQDRDAASARAWPKMHTVNGYVNRSLPGLIGCHRKSVYWHVIGMGTTPEVHSIFLEGHTFLVRNHRQASLEISPITFLTAQTLLMDLGQFLLFCHISSHQHDGMEAYVKVDSCPEEPQLRMKNNEEAEDYDDDLTDSEMDVVRFDDDNSPSFIQIRSVAKKHPKTWVHYIAAEEEDWDYAPLVLAPDGAPGSPAGSPTSTEEGTSESATPESGPGSEPATSGSETPASSDRSYKSQYLNNGPQRIGRKYKKVRFMAYTDETFKTREAIQHESGILGPLLYGEVGDTLLIIFKNQASRPYNIYPHGITDVRPLYSRRLPKGVKHLKDFPILPGEIFKYKWTVTVEDGPTKSDPRCLTRYYSSFVNMERDLASGLIGPLLICYKESVDQRGNQIMSDKRNVILFSVFDENRSWYLTENIQRFLPNPAGVQLEDPEFQASNIMHSINGYVFDSLQLSVCLHEVAYWYILSIGAQTDFLSVFFSGYTFKHKMVYEDTLTLFPFSGETVFMSMENPGLWILGCHNSDFRNRGMTALLKVSSCDKNTGDYYEDSYEDISAYLLSKNNAIEPRSFSQNPPVLKRHQREITRTTLQSDQEEIDYDDTISVEMKKEDFDIYDEDENQSPRSFQKKTRHYFIAAVERLWDYGMSSSPHVLRNRAQSGSVPQFKKVVFQEFTDGSFTQPLYRGELNEHLGLLGPYIRAEVEDNIMVTFRNQASRPYSFYSSLISYEEDQRQGAEPRKNFVKPNETKTYFWKVQHHMAPTKDEFDCKAWAYFSDVDLEKDVHSGLIGPLLVCHTNTLNPAHGRQVTVQEFALFFTIFDETKSWYFTENMERNCRAPCNIQMEDPTFKENYRFHAINGYIMDTLPGLVMAQDQRIRWYLLSMGSNENIHSIHFSGHVFTVRKKEEYKMALYNLYPGVFETVEMLPSKAGIWRVECLIGEHLHAGMSTLFLVYSNKCQTPLGMASGHIRDFQITASGQYGQWAPKLARLHYSGSINAWSTKEPFSWIKVDLLAPMIIHGIKTQGARQKFSSLYISQFIIMYSLDGKKWQTYRGNSTGTLMVFFGNVDSSGIKHNIFNPPIIARYIRLHPTHYSIRSTLRMELMGCDLNSCSMPLGMESKAISDAQITASSYFTNMFATWSPSKARLHLQGRSNAWRPQVNNPKEWLQVDFQKTMKVTGVTTQGVKSLLTSMYVKEFLISSSQDGHQWTLFFQNGKVKVFQGNQDSFTPVVNSLDPPLLTRYLRIHPQSWVHQIALRMEVLGCEAQDLYGAGSPGAETAEQKLISEEDLSPATG

SEQ ID NO: 725 - DNA, 4575 bp, Artificial Sequence
  Description of Artificial Sequence: Synthetic polynucleotide
atgcaaatagagctctccacctgcttctttctgtgccttttgcgattctgctttagtgccaccagaagatactacctgggtgcagtggaactgtcatgggactatatgcaaagtgatctcggtgagctgcctgtggacgcaagatttcctcctagagtgccaaaatcttttccattcaacacctcagtcgtgtacaaaaagactctgtttgtagaattcacggatcaccttttcaacatcgctaagccaaggccaccctggatgggtctgctaggtcctaccatccaggctgaggtttatgatacagtggtcattacacttaagaacatggcttcccatcctgtcagtcttcatgctgttggtgtatcctactggaaagcttctgagggagctgaatatgatgatcagaccagtcaaagggagaaagaagatgataaagtcttccctggtggaagccatacatatgtctggcaggtcctgaaagagaatggtccaatggcctctgacccactgtgccttacctactcatatctttctcatgtggacctggtaaaagacttgaattcaggcctcattggagccctactagtatgtagagaagggagtctggccaaggaaaagacacagaccttgcacaaatttatactactttttgctgtatttgatgaagggaaaagttggcactcagaaacaaagaactccttgatgcaggatagggatgctgcatctgctcgggcctggcctaaaatgcacacagtcaatggttatgtaaacaggtctctgccaggtctgattggatgccacaggaaatcagtctattggcatgtgattggaatgggcaccactcctgaagtgcactcaatattcctcgaaggtcacacatttcttgtgaggaaccatcgccaggctagcttggaaatctcgccaataactttccttactgctcaaacactcttgatggaccttggacagtttctactgttttgtcatatctcttcccaccaacatgatggcatggaagcttatgtcaaagtagacagctgtccagaggaaccccaactacgaatgaaaaataatgaagaagcggaagactatgatgatgatcttactgattctgaaatggatgtggtcaggtttgatgatgacaactctccttcctttatccaaattcgctcagttgccaagaagcatcctaaaacttgggtacattacattgctgctgaagaggaggactgggactatgctcccttagtcctcgcccccgatggcgcgccaggttctcctgctggctcccccacctcaacagaagaggggacaagcgaaagcgctacgcctgagagtggccctggctctgagccagccacctccggctctgaaacccctgcctcgagcgacagaagttataaaagtcaatatttgaacaatggccctcagcggattggtaggaagtacaaaaaagtccgatttatggcatacacagatgaaacctttaagactcgtgaagctattcagcatgaatcaggaatcttgggacctttactttatggggaagttggagacacactgttgattatatttaagaatcaagcaagcagaccatataacatctaccctcacggaatcactgatgtccgtcctttgtattcaaggagattaccaaaaggtgtaaaacatttgaaggattttccaattctgccaggagaaatattcaaatataaatggacagtgactgtagaagatgggccaactaaatcagatcctcggtgcctgacccgctattactctagtttcgttaatatggagagagatctagcttcaggactcattggccctctcctcatctgctacaaagaatctgtagatcaaagaggaaaccagataatgtcagacaagaggaatgtcatcctgttttctgtatttgatgagaaccgaagctggtacctcacagagaatatacaacgctttctccccaatccagctggagtgcagcttgaggatccagagttccaagcctccaacatcatgcacagcatcaatggctatgtttttgatagtttgcagttgtcagtttgtttgcatgaggtggcatactggtacattctaagcattggagcacagactgacttcctttctgtcttcttctctggatataccttcaaacacaaaatggtctatgaagacacactcaccctattcccattctcaggagaaactgtcttcatgtcgatggaaaacccaggtctatggattctggggtgccacaactcagactttcggaacagaggcatgaccgccttactgaaggtttctagttgtgacaagaacactggtgattattacgaggacagttatgaagatatttcagcatacttgctgagtaaaaacaatgccattgaaccaagaagcttctctcaaaacccaccagtcttgaaacgccatcaacgggaaataactcgtactactcttcagtcagatcaagaggaaatcgattatgatgataccatatcagttgaaatgaagaaggaagattttgacatttatgatgaggatgaaaatcagagcccccgcagctttcaaaagaaaacacgacactattttattgctgcagtggagaggctctgggattatgggatgagtagctccccacatgttctaagaaacagggctcagagtggcagtgtccctcagttcaagaaagttgttttccaggaatttactgatggctcctttactcagcccttataccgtggagaactaaatgaacatttgggactcctggggccatatataagagcagaagttgaagataatatcatggtaactttcagaaatcaggcctctcgtccctattccttctattctagccttatttcttatgaggaagatcagaggcaaggagcagaacctagaaaaaactttgtcaagcctaatgaaaccaaaacttacttttggaaagtgcaacatcatatggcacccactaaagatgagtttgactgcaaagcctgggcttatttctctgatgttgacctggaaaaagatgtgcactcaggcctgattggaccccttctggtctgccacactaacacactgaaccctgctcatgggagacaagtgacagtacaggaatttgctctgtttttcaccatctttgatgagaccaaaagctggtacttcactgaaaatatggaaagaaactgcagggctccctgcaatatccagatggaagatcccacttttaaagagaattatcgcttccatgcaatcaatggctacataatggatacactacctggcttagtaatggctcaggatcaaaggattcgatggtatctgctcagcatgggcagcaatgaaaacatccattctattcatttcagtggacatgtgttcactgtacgaaaaaaagaggagtataaaatggcactgtacaatctctatccaggtgtttttgagacagtggaaatgttaccatccaaagctggaatttggcgggtggaatgccttattggcgagcatctacatgctgggatgagcacactttttctggtgtacagcaataagtgtcagactcccctgggaatggcttctggacacattagagattttcagattacagcttcaggacaatatggacagtgggccccaaagctggccagacttcattattccggatcaatcaatgcctggagcaccaaggagcccttttcttggatcaaggtggatctgttggcaccaatgattattcacggcatcaagacccagggtgcccgtcagaagttctccagcctctacatctctcagtttatcatcatgtatagtcttgatgggaagaagtggcagacttatcgaggaaattccactggaaccttaatggtcttctttggcaatgtggattcatctgggataaaacacaatatttttaaccctccaattattgctcgatacatccgtttgcacccaactcattatagcattcgcagcactcttcgcatggagttgatgggctgtgatttaaatagttgcagcatgccattgggaatggagagtaaagcaatatcagatgcacagattactgcttcatcctactttaccaatatgtttgccacctggtctccttcaaaagctcgacttcacctccaagggaggagtaatgcctggagacctcaggtgaataatccaaaagagtggctgcaagtggacttccagaagacaatgaaagtcacaggagtaactactcagggagtaaaatctctgcttaccagcatgtatgtgaaggagttcctcatctccagcagtcaagatggccatcagtggactctcttttttcagaatggcaaagtaaaggtttttcagggaaatcaagactccttcacacctgtggtgaactctctagacccaccgttactgactcgctaccttcgaattcacccccagagttgggtgcaccagattgccctgaggatggaggttctgggctgcgaggcacaggacctctacggcgccggatcacctggggccgaaacggccgaacaaaaactcatctcagaagaggatctgtcacctgcaaccggttga

SEQ ID NO: 726 - protein, 1524 aa, Artificial Sequence
  Description of Artificial Sequence: Synthetic polypeptide
MQIELSTCFFLCLLRFCFSATRRYYLGAVELSWDYMQSDLGELPVDARFPPRVPKSFPFNTSVVYKKTLFVEFTDHLFNIAKPRPPWMGLLGPTIQAEVYDTVVITLKNMASHPVSLHAVGVSYWKASEGAEYDDQTSQREKEDDKVFPGGSHTYVWQVLKENGPMASDPLCLTYSYLSHVDLVKDLNSGLIGALLVCREGSLAKEKTQTLHKFILLFAVFDEGKSWHSETKNSLMQDRDAASARAWPKMHTVNGYVNRSLPGLIGCHRKSVYWHVIGMGTTPEVHSIFLEGHTFLVRNHRQASLEISPITFLTAQTLLMDLGQFLLFCHISSHQHDGMEAYVKVDSCPEEPQLRMKNNEEAEDYDDDLTDSEMDVVRFDDDNSPSFIQIRSVAKKHPKTWVHYIAAEEEDWDYAPLVLAPDDRSYKSQYLNNGPQRIGRKYKKVRFMAYTDETFKTREAIGAPGSPAGSPTSTEEGTSESATPESGPGSEPATSGSETPASSQHESGILGPLLYGEVGDTLLIIFKNQASRPYNIYPHGITDVRPLYSRRLPKGVKHLKDFPILPGEIFKYKWTVTVEDGPTKSDPRCLTRYYSSFVNMERDLASGLIGPLLICYKESVDQRGNQIMSDKRNVILFSVFDENRSWYLTENIQRFLPNPAGVQLEDPEFQASNIMHSINGYVFDSLQLSVCLHEVAYWYILSIGAQTDFLSVFFSGYTFKHKMVYEDTLTLFPFSGETVFMSMENPGLWILGCHNSDFRNRGMTALLKVSSCDKNTGDYYEDSYEDISAYLLSKNNAIEPRSFSQNPPVLKRHQREITRTTLQSDQEEIDYDDTISVEMKKEDFDIYDEDENQSPRSFQKKTRHYFIAAVERLWDYGMSSSPHVLRNRAQSGSVPQFKKVVFQEFTDGSFTQPLYRGELNEHLGLLGPYIRAEVEDNIMVTFRNQASRPYSFYSSLISYEEDQRQGAEPRKNFVKPNETKTYFWKVQHHMAPTKDEFDCKAWAYFSDVDLEKDVHSGLIGPLLVCHTNTLNPAHGRQVTVQEFALFFTIFDETKSWYFTENMERNCRAPCNIQMEDPTFKENYRFHAINGYIMDTLPGLVMAQDQRIRWYLLSMGSNENIHSIHFSGHVFTVRKKEEYKMALYNLYPGVFETVEMLPSKAGIWRVECLIGEHLHAGMSTLFLVYSNKCQTPLGMASGHIRDFQITASGQYGQWAPKLARLHYSGSINAWSTKEPFSWIKVDLLAPMIIHGIKTQGARQKFSSLYISQFIIMYSLDGKKWQTYRGNSTGTLMVFFGNVDSSGIKHNIFNPPIIARYIRLHPTHYSIRSTLRMELMGCDLNSCSMPLGMESKAISDAQITASSYFTNMFATWSPSKARLHLQGRSNAWRPQVNNPKEWLQVDFQKTMKVTGVTTQGVKSLLTSMYVKEFLISSSQDGHQWTLFFQNGKVKVFQGNQDSFTPVVNSLDPPLLTRYLRIHPQSWVHQIALRMEVLGCEAQDLYGAGSPGAETAEQKLISEEDLSPATG

SEQ ID NO: 727 - DNA, 4575 bp, Artificial Sequence
  Description of Artificial Sequence: Synthetic polynucleotide
atgcaaatagagctctccacctgcttctttctgtgccttttgcgattctgctttagtgccaccagaagatactacctgggtgcagtggaactgtcatgggactatatgcaaagtgatctcggtgagctgcctgtggacgcaagatttcctcctagagtgccaaaatcttttccattcaacacctcagtcgtgtacaaaaagactctgtttgtagaattcacggatcaccttttcaacatcgctaagccaaggccaccctggatgggtctgctaggtcctaccatccaggctgaggtttatgatacagtggtcattacacttaagaacatggcttcccatcctgtcagtcttcatgctgttggtgtatcctactggaaagcttctgagggagctgaatatgatgatcagaccagtcaaagggagaaagaagatgataaagtcttccctggtggaagccatacatatgtctggcaggtcctgaaagagaatggtccaatggcctctgacccactgtgccttacctactcatatctttctcatgtggacctggtaaaagacttgaattcaggcctcattggagccctactagtatgtagagaagggagtctggccaaggaaaagacacagaccttgcacaaatttatactactttttgctgtatttgatgaagggaaaagttggcactcagaaacaaagaactccttgatgcaggatagggatgctgcatctgctcgggcctggcctaaaatgcacacagtcaatggttatgtaaacaggtctctgccaggtctgattggatgccacaggaaatcagtctattggcatgtgattggaatgggcaccactcctgaagtgcactcaatattcctcgaaggtcacacatttcttgtgaggaaccatcgccaggctagcttggaaatctcgccaataactttccttactgctcaaacactcttgatggaccttggacagtttctactgttttgtcatatctcttcccaccaacatgatggcatggaagcttatgtcaaagtagacagctgtccagaggaaccccaactacgaatgaaaaataatgaagaagcggaagactatgatgatgatcttactgattctgaaatggatgtggtcaggtttgatgatgacaactctccttcctttatccaaattcgctcagttgccaagaagcatcctaaaacttgggtacattacattgctgctgaagaggaggactgggactatgctcccttagtcctcgcccccgatgacagaagttataaaagtcaatatttgaacaatggccctcagcggattggtaggaagtacaaaaaagtccgatttatggcatacacagatgaaacctttaagactcgtgaagctattggcgcgccaggttctcctgctggctcccccacctcaacagaagaggggacaagcgaaagcgctacgcctgagagtggccctggctctgagccagccacctccggctctgaaacccctgcctcgagccagcatgaatcaggaatcttgggacctttactttatggggaagttggagacacactgttgattatatttaagaatcaagcaagcagaccatataacatctaccctcacggaatcactgatgtccgtcctttgtattcaaggagattaccaaaaggtgtaaaacatttgaaggattttccaattctgccaggagaaatattcaaatataaatggacagtgactgtagaagatgggccaactaaatcagatcctcggtgcctgacccgctattactctagtttcgttaatatggagagagatctagcttcaggactcattggccctctcctcatctgctacaaagaatctgtagatcaaagaggaaaccagataatgtcagacaagaggaatgtcatcctgttttctgtatttgatgagaaccgaagctggtacctcacagagaatatacaacgctttctccccaatccagctggagtgcagcttgaggatccagagttccaagcctccaacatcatgcacagcatcaatggctatgtttttgatagtttgcagttgtcagtttgtttgcatgaggtggcatactggtacattctaagcattggagcacagactgacttcctttctgtcttcttctctggatataccttcaaacacaaaatggtctatgaagacacactcaccctattcccattctcaggagaaactgtcttcatgtcgatggaaaacccaggtctatggattctggggtgccacaactcagactttcggaacagaggcatgaccgccttactgaaggtttctagttgtgacaagaacactggtgattattacgaggacagttatgaagatatttcagcatacttgctgagtaaaaacaatgccattgaaccaagaagcttctctcaaaacccaccagtcttgaaacgccatcaacgggaaataactcgtactactcttcagtcagatcaagaggaaatcgattatgatgataccatatcagttgaaatgaagaaggaagattttgacatttatgatgaggatgaaaatcagagcccccgcagctttcaaaagaaaacacgacactattttattgctgcagtggagaggctctgggattatgggatgagtagctccccacatgttctaagaaacagggctcagagtggcagtgtccctcagttcaagaaagttgttttccaggaatttactgatggctcctttactcagcccttataccgtggagaactaaatgaacatttgggactcctggggccatatataagagcagaagttgaagataatatcatggtaactttcagaaatcaggcctctcgtccctattccttctattctagccttatttcttatgaggaagatcagaggcaaggagcagaacctagaaaaaactttgtcaagcctaatgaaaccaaaacttacttttggaaagtgcaacatcatatggcacccactaaagatgagtttgactgcaaagcctgggcttatttctctgatgttgacctggaaaaagatgtgcactcaggcctgattggaccccttctggtctgccacactaacacactgaaccctgctcatgggagacaagtgacagtacaggaatttgctctgtttttcaccatctttgatgagaccaaaagctggtacttcactgaaaatatggaaagaaactgcagggctccctgcaatatccagatggaagatcccacttttaaagagaattatcgcttccatgcaatcaatggctacataatggatacactacctggcttagtaatggctcaggatcaaaggattcgatggtatctgctcagcatgggcagcaatgaaaacatccattctattcatttcagtggacatgtgttcactgtacgaaaaaaagaggagtataaaatggcactgtacaatctctatccaggtgtttttgagacagtggaaatgttaccatccaaagctggaatttggcgggtggaatgccttattggcgagcatctacatgctgggatgagcacactttttctggtgtacagcaataagtgtcagactcccctgggaatggcttctggacacattagagattttcagattacagcttcaggacaatatggacagtgggccccaaagctggccagacttcattattccggatcaatcaatgcctggagcaccaaggagcccttttcttggatcaaggtggatctgttggcaccaatgattattcacggcatcaagacccagggtgcccgtcagaagttctccagcctctacatctctcagtttatcatcatgtatagtcttgatgggaagaagtggcagacttatcgaggaaattccactggaaccttaatggtcttctttggcaatgtggattcatctgggataaaacacaatatttttaaccctccaattattgctcgatacatccgtttgcacccaactcattatagcattcgcagcactcttcgcatggagttgatgggctgtgatttaaatagttgcagcatgccattgggaatggagagtaaagcaatatcagatgcacagattactgcttcatcctactttaccaatatgtttgccacctggtctccttcaaaagctcgacttcacctccaagggaggagtaatgcctggagacctcaggtgaataatccaaaagagtggctgcaagtggacttccagaagacaatgaaagtcacaggagtaactactcagggagtaaaatctctgcttaccagcatgtatgtgaaggagttcctcatctccagcagtcaagatggccatcagtggactctcttttttcagaatggcaaagtaaaggtttttcagggaaatcaagactccttcacacctgtggtgaactctctagacccaccgttactgactcgctaccttcgaattcacccccagagttgggtgcaccagattgccctgaggatggaggttctgggctgcgaggcacaggacctctacggcgccggatcacctggggccgaaacggccgaacaaaaactcatctcagaagaggatctgtcacctgcaaccggttga

SEQ ID NO: 728 - protein, 1527 aa, Artificial Sequence
  Description of Artificial Sequence: Synthetic polypeptide
MQIELSTCFFLCLLRFCFSATRRYYLGAVELSWDYMQSDLGELPVDARFPPRVPKSFPFNTSVVYKKTLFVEFTDHLFNIAKPRPPWMGLLGPTIQAEVYDTVVITLKNMASHPVSLHAVGVSYWKASEGAEYDDQTSQREKEDDKVFPGGSHTYVWQVLKENGPMASDPLCLTYSYLSHVDLVKDLNSGLIGALLVCREGSLAKEKTQTLHKFILLFAVFDEGKSWHSETKNSLMQDRDAASARAWPKMHTVNGYVNRSLPGLIGCHRKSVYWHVIGMGTTPEVHSIFLEGHTFLVRNHRQASLEISPITFLTAQTLLMDLGQFLLFCHISSHQHDGMEAYVKVDSCPEEPQLRMKNNEEAEDYDDDLTDSEMDVVRFDDDNSPSFIQIRSVAKKHPKTWVHYIAAEEEDWDYAPLVLAPDDRSYKSQYLNNGPQRIGRKYKKVRFMAYTDETFKTREAIQHESGILGPLLYGEVGDTLLIIFKNQASRPYNIYPHGITDVRPLYSRRLPKGAPGSPAGSPTSTEEGTSESATPESGPGSEPATSGSETPASSLPKGVKHLKDFPILPGEIFKYKWTVTVEDGPTKSDPRCLTRYYSSFVNMERDLASGLIGPLLICYKESVDQRGNQIMSDKRNVILFSVFDENRSWYLTENIQRFLPNPAGVQLEDPEFQASNIMHSINGYVFDSLQLSVCLHEVAYWYILSIGAQTDFLSVFFSGYTFKHKMVYEDTLTLFPFSGETVFMSMENPGLWILGCHNSDFRNRGMTALLKVSSCDKNTGDYYEDSYEDISAYLLSKNNAIEPRSFSQNPPVLKRHQREITRTTLQSDQEEIDYDDTISVEMKKEDFDIYDEDENQSPRSFQKKTRHYFIAAVERLWDYGMSSSPHVLRNRAQSGSVPQFKKVVFQEFTDGSFTQPLYRGELNEHLGLLGPYIRAEVEDNIMVTFRNQASRPYSFYSSLISYEEDQRQGAEPRKNFVKPNETKTYFWKVQHHMAPTKDEFDCKAWAYFSDVDLEKDVHSGLIGPLLVCHTNTLNPAHGRQVTVQEFALFFTIFDETKSWYFTENMERNCRAPCNIQMEDPTFKENYRFHAINGYIMDTLPGLVMAQDQRIRWYLLSMGSNENIHSIHFSGHVFTVRKKEEYKMALYNLYPGVFETVEMLPSKAGIWRVECLIGEHLHAGMSTLFLVYSNKCQTPLGMASGHIRDFQITASGQYGQWAPKLARLHYSGSINAWSTKEPFSWIKVDLLAPMIIHGIKTQGARQKFSSLYISQFIIMYSLDGKKWQTYRGNSTGTLMVFFGNVDSSGIKHNIFNPPIIARYIRLHPTHYSIRSTLRMELMGCDLNSCSMPLGMESKAISDAQITASSYFTNMFATWSPSKARLHLQGRSNAWRPQVNNPKEWLQVDFQKTMKVTGVTTQGVKSLLTSMYVKEFLISSSQDGHQWTLFFQNGKVKVFQGNQDSFTPVVNSLDPPLLTRYLRIHPQSWVHQIALRMEVLGCEAQDLYGAGSPGAETAEQKLISEEDLSPATG

SEQ ID NO: 729 - DNA, 4584 bp, Artificial Sequence
  Description of Artificial Sequence: Synthetic polynucleotide
atgcaaatagagctctccacctgcttctttctgtgccttttgcgattctgctttagtgccaccagaagatactacctgggtgcagtggaactgtcatgggactatatgcaaagtgatctcggtgagctgcctgtggacgcaagatttcctcctagagtgccaaaatcttttccattcaacacctcagtcgtgtacaaaaagactctgtttgtagaattcacggatcaccttttcaacatcgctaagccaaggccaccctggatgggtctgctaggtcctaccatccaggctgaggtttatgatacagtggtcattacacttaagaacatggcttcccatcctgtcagtcttcatgctgttggtgtatcctactggaaagcttctgagggagctgaatatgatgatcagaccagtcaaagggagaaagaagatgataaagtcttccctggtggaagccatacatatgtctggcaggtcctgaaagagaatggtccaatggcctctgacccactgtgccttacctactcatatctttctcatgtggacctggtaaaagacttgaattcaggcctcattggagccctactagtatgtagagaagggagtctggccaaggaaaagacacagaccttgcacaaatttatactactttttgctgtatttgatgaagggaaaagttggcactcagaaacaaagaactccttgatgcaggatagggatgctgcatctgctcgggcctggcctaaaatgcacacagtcaatggttatgtaaacaggtctctgccaggtctgattggatgccacaggaaatcagtctattggcatgtgattggaatgggcaccactcctgaagtgcactcaatattcctcgaaggtcacacatttcttgtgaggaaccatcgccaggctagcttggaaatctcgccaataactttccttactgctcaaacactcttgatggaccttggacagtttctactgttttgtcatatctcttcccaccaacatgatggcatggaagcttatgtcaaagtagacagctgtccagaggaaccccaactacgaatgaaaaataatgaagaagcggaagactatgatgatgatcttactgattctgaaatggatgtggtcaggtttgatgatgacaactctccttcctttatccaaattcgctcagttgccaagaagcatcctaaaacttgggtacattacattgctgctgaagaggaggactgggactatgctcccttagtcctcgcccccgatgacagaagttataaaagtcaatatttgaacaatggccctcagcggattggtaggaagtacaaaaaagtccgatttatggcatacacagatgaaacctttaagactcgtgaagctattcagcatgaatcaggaatcttgggacctttactttatggggaagttggagacacactgttgattatatttaagaatcaagcaagcagaccatataacatctaccctcacggaatcactgatgtccgtcctttgtattcaaggagactccctaaaggcgcgccaggttctcctgctggctcccccacctcaacagaagaggggacaagcgaaagcgctacgcctgagagtggccctggctctgagccagccacctccggctctgaaacccctgcctcgagcttaccaaaaggtgtaaaacatttgaaggattttccaattctgccaggagaaatattcaaatataaatggacagtgactgtagaagatgggccaactaaatcagatcctcggtgcctgacccgctattactctagtttcgttaatatggagagagatctagcttcaggactcattggccctctcctcatctgctacaaagaatctgtagatcaaagaggaaaccagataatgtcagacaagaggaatgtcatcctgttttctgtatttgatgagaaccgaagctggtacctcacagagaatatacaacgctttctccccaatccagctggagtgcagcttgaggatccagagttccaagcctccaacatcatgcacagcatcaatggctatgtttttgatagtttgcagttgtcagtttgtttgcatgaggtggcatactggtacattctaagcattggagcacagactgacttcctttctgtcttcttctctggatataccttcaaacacaaaatggtctatgaagacacactcaccctattcccattctcaggagaaactgtcttcatgtcgatggaaaacccaggtctatggattctggggtgccacaactcagactttcggaacagaggcatgaccgccttactgaaggtttctagttgtgacaagaacactggtgattattacgaggacagttatgaagatatttcagcatacttgctgagtaaaaacaatgccattgaaccaagaagcttctctcaaaacccaccagtcttgaaacgccatcaacgggaaataactcgtactactcttcagtcagatcaagaggaaatcgattatgatgataccatatcagttgaaatgaagaaggaagattttgacatttatgatgaggatgaaaatcagagcccccgcagctttcaaaagaaaacacgacactattttattgctgcagtggagaggctctgggattatgggatgagtagctccccacatgttctaagaaacagggctcagagtggcagtgtccctcagttcaagaaagttgttttccaggaatttactgatggctcctttactcagcccttataccgtggagaactaaatgaacatttgggactcctggggccatatataagagcagaagttgaagataatatcatggtaactttcagaaatcaggcctctcgtccctattccttctattctagccttatttcttatgaggaagatcagaggcaaggagcagaacctagaaaaaactttgtcaagcctaatgaaaccaaaacttacttttggaaagtgcaacatcatatggcacccactaaagatgagtttgactgcaaagcctgggcttatttctctgatgttgacctggaaaaagatgtgcactcaggcctgattggaccccttctggtctgccacactaacacactgaaccctgctcatgggagacaagtgacagtacaggaatttgctctgtttttcaccatctttgatgagaccaaaagctggtacttcactgaaaatatggaaagaaactgcagggctccctgcaatatccagatggaagatcccacttttaaagagaattatcgcttccatgcaatcaatggctacataatggatacactacctggcttagtaatggctcaggatcaaaggattcgatggtatctgctcagcatgggcagcaatgaaaacatccattctattcatttcagtggacatgtgttcactgtacgaaaaaaagaggagtataaaatggcactgtacaatctctatccaggtgtttttgagacagtggaaatgttaccatccaaagctggaatttggcgggtggaatgccttattggcgagcatctacatgctgggatgagcacactttttctggtgtacagcaataagtgtcagactcccctgggaatggcttctggacacattagagattttcagattacagcttcaggacaatatggacagtgggccccaaagctggccagacttcattattccggatcaatcaatgcctggagcaccaaggagcccttttcttggatcaaggtggatctgttggcaccaatgattattcacggcatcaagacccagggtgcccgtcagaagttctccagcctctacatctctcagtttatcatcatgtatagtcttgatgggaagaagtggcagacttatcgaggaaattccactggaaccttaatggtcttctttggcaatgtggattcatctgggataaaacacaatatttttaaccctccaattattgctcgatacatccgtttgcacccaactcattatagcattcgcagcactcttcgcatggagttgatgggctgtgatttaaatagttgcagcatgccattgggaatggagagtaaagcaatatcagatgcacagattactgcttcatcctactttaccaatatgtttgccacctggtctccttcaaaagctcgacttcacctccaagggaggagtaatgcctggagacctcaggtgaataatccaaaagagtggctgcaagtggacttccagaagacaatgaaagtcacaggagtaactactcagggagtaaaatctctgcttaccagcatgtatgtgaaggagttcctcatctccagcagtcaagatggccatcagtggactctcttttttcagaatggcaaagtaaaggtttttcagggaaatcaagactccttcacacctgtggtgaactctctagacccaccgttactgactcgctaccttcgaattcacccccagagttgggtgcaccagattgccctgaggatggaggttctgggctgcgaggcacaggacctctacggcgccggatcacctggggccgaaacggccgaacaaaaactcatctcagaagaggatctgtcacctgcaaccggttga

SEQ ID NO: 730 - protein, 1524 aa, Artificial Sequence
  Description of Artificial Sequence: Synthetic polypeptide
MQIELSTCFFLCLLRFCFSATRRYYLGAVELSWDYMQSDLGELPVDARFPPRVPKSFPFNTSVVYKKTLFVEFTDHLFNIAKPRPPWMGLLGPTIQAEVYDTVVITLKNMASHPVSLHAVGVSYWKASEGAEYDDQTSQREKEDDKVFPGGSHTYVWQVLKENGPMASDPLCLTYSYLSHVDLVKDLNSGLIGALLVCREGSLAKEKTQTLHKFILLFAVFDEGKSWHSETKNSLMQDRDAASARAWPKMHTVNGYVNRSLPGLIGCHRKSVYWHVIGMGTTPEVHSIFLEGHTFLVRNHRQASLEISPITFLTAQTLLMDLGQFLLFCHISSHQHDGMEAYVKVDSCPEEPQLRMKNNEEAEDYDDDLTDSEMDVVRFDDDNSPSFIQIRSVAKKHPKTWVHYIAAEEEDWDYAPLVLAPDDRSYKSQYLNNGPQRIGRKYKKVRFMAYTDETFKTREAIQHESGILGPLLYGEVGDTLLIIFKNQASRPYNIYPHGITDVRPLYSRRLPKGVKHLKDFPILPGEIFKYKWTVTVEGAPGSPAGSPTSTEEGTSESATPESGPGSEPATSGSETPASSDGPTKSDPRCLTRYYSSFVNMERDLASGLIGPLLICYKESVDQRGNQIMSDKRNVILFSVFDENRSWYLTENIQRFLPNPAGVQLEDPEFQASNIMHSINGYVFDSLQLSVCLHEVAYWYILSIGAQTDFLSVFFSGYTFKHKMVYEDTLTLFPFSGETVFMSMENPGLWILGCHNSDFRNRGMTALLKVSSCDKNTGDYYEDSYEDISAYLLSKNNAIEPRSFSQNPPVLKRHQREITRTTLQSDQEEIDYDDTISVEMKKEDFDIYDEDENQSPRSFQKKTRHYFIAAVERLWDYGMSSSPHVLRNRAQSGSVPQFKKVVFQEFTDGSFTQPLYRGELNEHLGLLGPYIRAEVEDNIMVTFRNQASRPYSFYSSLISYEEDQRQGAEPRKNFVKPNETKTYFWKVQHHMAPTKDEFDCKAWAYFSDVDLEKDVHSGLIGPLLVCHTNTLNPAHGRQVTVQEFALFFTIFDETKSWYFTENMERNCRAPCNIQMEDPTFKENYRFHAINGYIMDTLPGLVMAQDQRIRWYLLSMGSNENIHSIHFSGHVFTVRKKEEYKMALYNLYPGVFETVEMLPSKAGIWRVECLIGEHLHAGMSTLFLVYSNKCQTPLGMASGHIRDFQITASGQYGQWAPKLARLHYSGSINAWSTKEPFSWIKVDLLAPMIIHGIKTQGARQKFSSLYISQFIIMYSLDGKKWQTYRGNSTGTLMVFFGNVDSSGIKHNIFNPPIIARYIRLHPTHYSIRSTLRMELMGCDLNSCSMPLGMESKAISDAQITASSYFTNMFATWSPSKARLHLQGRSNAWRPQVNNPKEWLQVDFQKTMKVTGVTTQGVKSLLTSMYVKEFLISSSQDGHQWTLFFQNGKVKVFQGNQDSFTPVVNSLDPPLLTRYLRIHPQSWVHQIALRMEVLGCEAQDLYGAGSPGAETAEQKLISEEDLSPATG

SEQ ID NO: 731 - DNA, 4575 bp, Artificial Sequence
  Description of Artificial Sequence: Synthetic polynucleotide
atgcaaatagagctctccacctgcttctttctgtgccttttgcgattctgctttagtgccaccagaagatactacctgggtgcagtggaactgtcatgggactatatgcaaagtgatctcggtgagctgcctgtggacgcaagatttcctcctagagtgccaaaatcttttccattcaacacctcagtcgtgtacaaaaagactctgtttgtagaattcacggatcaccttttcaacatcgctaagccaaggccaccctggatgggtctgctaggtcctaccatccaggctgaggtttatgatacagtggtcattacacttaagaacatggcttcccatcctgtcagtcttcatgctgttggtgtatcctactggaaagcttctgagggagctgaatatgatgatcagaccagtcaaagggagaaagaagatgataaagtcttccctggtggaagccatacatatgtctggcaggtcctgaaagagaatggtccaatggcctctgacccactgtgccttacctactcatatctttctcatgtggacctggtaaaagacttgaattcaggcctcattggagccctactagtatgtagagaagggagtctggccaaggaaaagacacagaccttgcacaaatttatactactttttgctgtatttgatgaagggaaaagttggcactcagaaacaaagaactccttgatgcaggatagggatgctgcatctgctcgggcctggcctaaaatgcacacagtcaatggttatgtaaacaggtctctgccaggtctgattggatgccacaggaaatcagtctattggcatgtgattggaatgggcaccactcctgaagtgcactcaatattcctcgaaggtcacacatttcttgtgaggaaccatcgccaggctagcttggaaatctcgccaataactttccttactgctcaaacactcttgatggaccttggacagtttctactgttttgtcatatctcttcccaccaacatgatggcatggaagcttatgtcaaagtagacagctgtccagaggaaccccaactacgaatgaaaaataatgaagaagcggaagactatgatgatgatcttactgattctgaaatggatgtggtcaggtttgatgatgacaactctccttcctttatccaaattcgctcagttgccaagaagcatcctaaaacttgggtacattacattgctgctgaagaggaggactgggactatgctcccttagtcctcgcccccgatgacagaagttataaaagtcaatatttgaacaatggccctcagcggattggtaggaagtacaaaaaagtccgatttatggcatacacagatgaaacctttaagactcgtgaagctattcagcatgaatcaggaatcttgggacctttactttatggggaagttggagacacactgttgattatatttaagaatcaagcaagcagaccatataacatctaccctcacggaatcactgatgtccgtcctttgtattcaaggagattaccaaaaggtgtaaaacatttgaaggattttccaattctgccaggagaaatattcaaatataaatggacagtgactgtagaaggcgcgccaggttctcctgctggctcccccacctcaacagaagaggggacaagcgaaagcgctacgcctgagagtggccctggctctgagccagccacctccggctctgaaacccctgcctcgagcgatgggccaactaaatcagatcctcggtgcctgacccgctattactctagtttcgttaatatggagagagatctagcttcaggactcattggccctctcctcatctgctacaaagaatctgtagatcaaagaggaaaccagataatgtcagacaagaggaatgtcatcctgttttctgtatttgatgagaaccgaagctggtacctcacagagaatatacaacgctttctccccaatccagctggagtgcagcttgaggatccagagttccaagcctccaacatcatgcacagcatcaatggctatgtttttgatagtttgcagttgtcagtttgtttgcatgaggtggcatactggtacattctaagcattggagcacagactgacttcctttctgtcttcttctctggatataccttcaaacacaaaatggtctatgaagacacactcaccctattcccattctcaggagaaactgtcttcatgtcgatggaaaacccaggtctatggattctggggtgccacaactcagactttcggaacagaggcatgaccgccttactgaaggtttctagttgtgacaagaacactggtgattattacgaggacagttatgaagatatttcagcatacttgctgagtaaaaacaatgccattgaaccaagaagcttctctcaaaacccaccagtcttgaaacgccatcaacgggaaataactcgtactactcttcagtcagatcaagaggaaatcgattatgatgataccatatcagttgaaatgaagaaggaagattttgacatttatgatgaggatgaaaatcagagcccccgcagctttcaaaagaaaacacgacactattttattgctgcagtggagaggctctgggattatgggatgagtagctccccacatgttctaagaaacagggctcagagtggcagtgtccctcagttcaagaaagttgttttccaggaatttactgatggctcctttactcagcccttataccgtggagaactaaatgaacatttgggactcctggggccatatataagagcagaagttgaagataatatcatggtaactttcagaaatcaggcctctcgtccctattccttctattctagccttatttcttatgaggaagatcagaggcaaggagcagaacctagaaaaaactttgtcaagcctaatgaaaccaaaacttacttttggaaagtgcaacatcatatggcacccactaaagatgagtttgactgcaaagcctgggcttatttctctgatgttgacctggaaaaagatgtgcactcaggcctgattggaccccttctggtctgccacactaacacactgaaccctgctcatgggagacaagtgacagtacaggaatttgctctgtttttcaccatctttgatgagaccaaaagctggtacttcactgaaaatatggaaagaaactgcagggctccctgcaatatccagatggaagatcccacttttaaagagaattatcgcttccatgcaatcaatggctacataatggatacactacctggcttagtaatggctcaggatcaaaggattcgatggtatctgctcagcatgggcagcaatgaaaacatccattctattcatttcagtggacatgtgttcactgtacgaaaaaaagaggagtataaaatggcactgtacaatctctatccaggtgtttttgagacagtggaaatgttaccatccaaagctggaatttggcgggtggaatgccttattggcgagcatctacatgctgggatgagcacactttttctggtgtacagcaataagtgtcagactcccctgggaatggcttctggacacattagagattttcagattacagcttcaggacaatatggacagtgggccccaaagctggccagacttcattattccggatcaatcaatgcctggagcaccaaggagcccttttcttggatcaaggtggatctgttggcaccaatgattattcacggcatcaagacccagggtgcccgtcagaagttctccagcctctacatctctcagtttatcatcatgtatagtcttgatgggaagaagtggcagacttatcgaggaaattccactggaaccttaatggtcttctttggcaatgtggattcatctgggataaaacacaatatttttaaccctccaattattgctcgatacatccgtttgcacccaactcattatagcattcgcagcactcttcgcatggagttgatgggctgtgatttaaatagttgcagcatgccattgggaatggagagtaaagcaatatcagatgcacagattactgcttcatcctactttaccaatatgtttgccacctggtctccttcaaaagctcgacttcacctccaagggaggagtaatgcctggagacctcaggtgaataatccaaaagagtggctgcaagtggacttccagaagacaatgaaagtcacaggagtaactactcagggagtaaaatctctgcttaccagcatgtatgtgaaggagttcctcatctccagcagtcaagatggccatcagtggactctcttttttcagaatggcaaagtaaaggtttttcagggaaatcaagactccttcacacctgtggtgaactctctagacccaccgttactgactcgctaccttcgaattcacccccagagttgggtgcaccagattgccctgaggatggaggttctgggctgcgaggcacaggacctctacggcgccggatcacctggggccgaaacggccgaacaaaaactcatctcagaagaggatctgtcacctgcaaccggttga

SEQ ID NO: 732 - protein, 1524 aa, Artificial Sequence
  Description of Artificial Sequence: Synthetic polypeptide
MQIELSTCFFLCLLRFCFSATRRYYLGAVELSWDYMQSDLGELPVDARFPPRVPKSFPFNTSVVYKKTLFVEFTDHLFNIAKPRPPWMGLLGPTIQAEVYDTVVITLKNMASHPVSLHAVGVSYWKASEGAEYDDQTSQREKEDDKVFPGGSHTYVWQVLKENGPMASDPLCLTYSYLSHVDLVKDLNSGLIGALLVCREGSLAKEKTQTLHKFILLFAVFDEGKSWHSETKNSLMQDRDAASARAWPKMHTVNGYVNRSLPGLIGCHRKSVYWHVIGMGTTPEVHSIFLEGHTFLVRNHRQASLEISPITFLTAQTLLMDLGQFLLFCHISSHQHDGMEAYVKVDSCPEEPQLRMKNNEEAEDYDDDLTDSEMDVVRFDDDNSPSFIQIRSVAKKHPKTWVHYIAAEEEDWDYAPLVLAPDDRSYKSQYLNNGPQRIGRKYKKVRFMAYTDETFKTREAIQHESGILGPLLYGEVGDTLLIIFKNQASRPYNIYPHGITDVRPLYSRRLPKGVKHLKDFPILPGEIFKYKWTVTVEDGPTKSDPRCLTRYYSSFVNMERDLASGLIGPLLICYKESVDQRGNQIMSDKRNVILFSVFDENRSWYLTENIQRFLPNPAGAPGSPAGSPTSTEEGTSESATPESGPGSEPATSGSETPASSGVQLEDPEFQASNIMHSINGYVFDSLQLSVCLHEVAYWYILSIGAQTDFLSVFFSGYTFKHKMVYEDTLTLFPFSGETVFMSMENPGLWILGCHNSDFRNRGMTALLKVSSCDKNTGDYYEDSYEDISAYLLSKNNAIEPRSFSQNPPVLKRHQREITRTTLQSDQEEIDYDDTISVEMKKEDFDIYDEDENQSPRSFQKKTRHYFIAAVERLWDYGMSSSPHVLRNRAQSGSVPQFKKVVFQEFTDGSFTQPLYRGELNEHLGLLGPYIRAEVEDNIMVTFRNQASRPYSFYSSLISYEEDQRQGAEPRKNFVKPNETKTYFWKVQHHMAPTKDEFDCKAWAYFSDVDLEKDVHSGLIGPLLVCHTNTLNPAHGRQVTVQEFALFFTIFDETKSWYFTENMERNCRAPCNIQMEDPTFKENYRFHAINGYIMDTLPGLVMAQDQRIRWYLLSMGSNENIHSIHFSGHVFTVRKKEEYKMALYNLYPGVFETVEMLPSKAGIWRVECLIGEHLHAGMSTLFLVYSNKCQTPLGMASGHIRDFQITASGQYGQWAPKLARLHYSGSINAWSTKEPFSWIKVDLLAPMIIHGIKTQGARQKFSSLYISQFIIMYSLDGKKWQTYRGNSTGTLMVFFGNVDSSGIKHNIFNPPIIARYIRLHPTHYSIRSTLRMELMGCDLNSCSMPLGMESKAISDAQITASSYFTNMFATWSPSKARLHLQGRSNAWRPQVNNPKEWLQVDFQKTMKVTGVTTQGVKSLLTSMYVKEFLISSSQDGHQWTLFFQNGKVKVFQGNQDSFTPVVNSLDPPLLTRYLRIHPQSWVHQIALRMEVLGCEAQDLYGAGSPGAETAEQKLISEEDLSPATG

SEQ ID NO: 733 - DNA, 4575 bp, Artificial Sequence
  Description of Artificial Sequence: Synthetic polynucleotide
atgcaaatagagctctccacctgcttctttctgtgccttttgcgattctgctttagtgccaccagaagatactacctgggtgcagtggaactgtcatgggactatatgcaaagtgatctcggtgagctgcctgtggacgcaagatttcctcctagagtgccaaaatcttttccattcaacacctcagtcgtgtacaaaaagactctgtttgtagaattcacggatcaccttttcaacatcgctaagccaaggccaccctggatgggtctgctaggtcctaccatccaggctgaggtttatgatacagtggtcattacacttaagaacatggcttcccatcctgtcagtcttcatgctgttggtgtatcctactggaaagcttctgagggagctgaatatgatgatcagaccagtcaaagggagaaagaagatgataaagtcttccctggtggaagccatacatatgtctggcaggtcctgaaagagaatggtccaatggcctctgacccactgtgccttacctactcatatctttctcatgtggacctggtaaaagacttgaattcaggcctcattggagccctactagtatgtagagaagggagtctggccaaggaaaagacacagaccttgcacaaatttatactactttttgctgtatttgatgaagggaaaagttggcactcagaaacaaagaactccttgatgcaggatagggatgctgcatctgctcgggcctggcctaaaatgcacacagtcaatggttatgtaaacaggtctctgccaggtctgattggatgccacaggaaatcagtctattggcatgtgattggaatgggcaccactcctgaagtgcactcaatattcctcgaaggtcacacatttcttgtgaggaaccatcgccaggctagcttggaaatctcgccaataactttccttactgctcaaacactcttgatggaccttggacagtttctactgttttgtcatatctcttcccaccaacatgatggcatggaagcttatgtcaaagtagacagctgtccagaggaaccccaactacgaatgaaaaataatgaagaagcggaagactatgatgatgatcttactgattctgaaatggatgtggtcaggtttgatgatgacaactctccttcctttatccaaattcgctcagttgccaagaagcatcctaaaacttgggtacattacattgctgctgaagaggaggactgggactatgctcccttagtcctcgcccccgatgacagaagttataaaagtcaatatttgaacaatggccctcagcggattggtaggaagtacaaaaaagtccgatttatggcatacacagatgaaacctttaagactcgtgaagctattcagcatgaatcaggaatcttgggacctttactttatggggaagttggagacacactgttgattatatttaagaatcaagcaagcagaccatataacatctaccctcacggaatcactgatgtccgtcctttgtattcaaggagattaccaaaaggtgtaaaacatttgaaggattttccaattctgccaggagaaatattcaaatataaatggacagtgactgtagaagatgggccaactaaatcagatcctcggtgcctgacccgctattactctagtttcgttaatatggagagagatctagcttcaggactcattggccctctcctcatctgctacaaagaatctgtagatcaaagaggaaaccagataatgtcagacaagaggaatgtcatcctgttttctgtatttgatgagaaccgaagctggtacctcacagagaatatacaacgctttctccccaatccagctggcgcgccaggttctcctgctggctcccccacctcaacagaagaggggacaagcgaaagcgctacgcctgagagtggccctggctctgagccagccacctccggctctgaaacccctgcctcgagcggagtgcagcttgaggatccagagttccaagcctccaacatcatgcacagcatcaatggctatgtttttgatagtttgcagttgtcagtttgtttgcatgaggtggcatactggtacattctaagcattggagcacagactgacttcctttctgtcttcttctctggatataccttcaaacacaaaatggtctatgaagacacactcaccctattcccattctcaggagaaactgtcttcatgtcgatggaaaacccaggtctatggattctggggtgccacaactcagactttcggaacagaggcatgaccgccttactgaaggtttctagttgtgacaagaacactggtgattattacgaggacagttatgaagatatttcagcatacttgctgagtaaaaacaatgccattgaaccaagaagcttctctcaaaacccaccagtcttgaaacgccatcaacgggaaataactcgtactactcttcagtcagatcaagaggaaatcgattatgatgataccatatcagttgaaatgaagaaggaagattttgacatttatgatgaggatgaaaatcagagcccccgcagctttcaaaagaaaacacgacactattttattgctgcagtggagaggctctgggattatgggatgagtagctccccacatgttctaagaaacagggctcagagtggcagtgtccctcagttcaagaaagttgttttccaggaatttactgatggctcctttactcagcccttataccgtggagaactaaatgaacatttgggactcctggggccatatataagagcagaagttgaagataatatcatggtaactttcagaaatcaggcctctcgtccctattccttctattctagccttatttcttatgaggaagatcagaggcaaggagcagaacctagaaaaaactttgtcaagcctaatgaaaccaaaacttacttttggaaagtgcaacatcatatggcacccactaaagatgagtttgactgcaaagcctgggcttatttctctgatgttgacctggaaaaagatgtgcactcaggcctgattggaccccttctggtctgccacactaacacactgaaccctgctcatgggagacaagtgacagtacaggaatttgctctgtttttcaccatctttgatgagaccaaaagctggtacttcactgaaaatatggaaagaaactgcagggctccctgcaatatccagatggaagatcccacttttaaagagaattatcgcttccatgcaatcaatggctacataatggatacactacctggcttagtaatggctcaggatcaaaggattcgatggtatctgctcagcatgggcagcaatgaaaacatccattctattcatttcagtggacatgtgttcactgtacgaaaaaaagaggagtataaaatggcactgtacaatctctatccaggtgtttttgagacagtggaaatgttaccatccaaagctggaatttggcgggtggaatgccttattggcgagcatctacatgctgggatgagcacactttttctggtgtacagcaataagtgtcagactcccctgggaatggcttctggacacattagagattttcagattacagcttcaggacaatatggacagtgggccccaaagctggccagacttcattattccggatcaatcaatgcctggagcaccaaggagcccttttcttggatcaaggtggatctgttggcaccaatgattattcacggcatcaagacccagggtgcccgtcagaagttctccagcctctacatctctcagtttatcatcatgtatagtcttgatgggaagaagtggcagacttatcgaggaaattccactggaaccttaatggtcttctttggcaatgtggattcatctgggataaaacacaatatttttaaccctccaattattgctcgatacatccgtttgcacccaactcattatagcattcgcagcactcttcgcatggagttgatgggctgtgatttaaatagttgcagcatgccattgggaatggagagtaaagcaatatcagatgcacagattactgcttcatcctactttaccaatatgtttgccacctggtctccttcaaaagctcgacttcacctccaagggaggagtaatgcctggagacctcaggtgaataatccaaaagagtggctgcaagtggacttccagaagacaatgaaagtcacaggagtaactactcagggagtaaaatctctgcttaccagcatgtatgtgaaggagttcctcatctccagcagtcaagatggccatcagtggactctcttttttcagaatggcaaagtaaaggtttttcagggaaatcaagactccttcacacctgtggtgaactctctagacccaccgttactgactcgctaccttcgaattcacccccagagttgggtgcaccagattgccctgaggatggaggttctgggctgcgaggcacaggacctctacggcgccggatcacctggggccgaaacggccgaacaaaaactcatctcagaagaggatctgtcacctgcaaccggttga

SEQ ID NO: 734 - protein, 1524 aa, Artificial Sequence
  Description of Artificial Sequence: Synthetic polypeptide
MQIELSTCFFLCLLRFCFSATRRYYLGAVELSWDYMQSDLGELPVDARFPPRVPKSFPFNTSVVYKKTLFVEFTDHLFNIAKPRPPWMGLLGPTIQAEVYDTVVITLKNMASHPVSLHAVGVSYWKASEGAEYDDQTSQREKEDDKVFPGGSHTYVWQVLKENGPMASDPLCLTYSYLSHVDLVKDLNSGLIGALLVCREGSLAKEKTQTLHKFILLFAVFDEGKSWHSETKNSLMQDRDAASARAWPKMHTVNGYVNRSLPGLIGCHRKSVYWHVIGMGTTPEVHSIFLEGHTFLVRNHRQASLEISPITFLTAQTLLMDLGQFLLFCHISSHQHDGMEAYVKVDSCPEEPQLRMKNNEEAEDYDDDLTDSEMDVVRFDDDNSPSFIQIRSVAKKHPKTWVHYIAAEEEDWDYAPLVLAPDDRSYKSQYLNNGPQRIGRKYKKVRFMAYTDETFKTREAIQHESGILGPLLYGEVGDTLLIIFKNQASRPYNIYPHGITDVRPLYSRRLPKGVKHLKDFPILPGEIFKYKWTVTVEDGPTKSDPRCLTRYYSSFVNMERDLASGLIGPLLICYKESVDQRGNQIMSDKRNVILFSVFDENRSWYLTENIQRFLPNPAGVQLEDPEFQASNIMHSINGYVFDSLQLSVCLHEVAYWYILSIGAQTDFLSVFFSGYTFKHKMVYEDTLTLFPFSGETVFMSMENPGLWILGCHNSDFRNRGMTALLKVSSCDKGAPGSPAGSPTSTEEGTSESATPESGPGSEPATSGSETPASSNTGDYYEDSYEDISAYLLSKNNAIEPRSFSQNPPVLKRHQREITRTTLQSDQEEIDYDDTISVEMKKEDFDIYDEDENQSPRSFQKKTRHYFIAAVERLWDYGMSSSPHVLRNRAQSGSVPQFKKVVFQEFTDGSFTQPLYRGELNEHLGLLGPYIRAEVEDNIMVTFRNQASRPYSFYSSLISYEEDQRQGAEPRKNFVKPNETKTYFWKVQHHMAPTKDEFDCKAWAYFSDVDLEKDVHSGLIGPLLVCHTNTLNPAHGRQVTVQEFALFFTIFDETKSWYFTENMERNCRAPCNIQMEDPTFKENYRFHAINGYIMDTLPGLVMAQDQRIRWYLLSMGSNENIHSIHFSGHVFTVRKKEEYKMALYNLYPGVFETVEMLPSKAGIWRVECLIGEHLHAGMSTLFLVYSNKCQTPLGMASGHIRDFQITASGQYGQWAPKLARLHYSGSINAWSTKEPFSWIKVDLLAPMIIHGIKTQGARQKFSSLYISQFIIMYSLDGKKWQTYRGNSTGTLMVFFGNVDSSGIKHNIFNPPIIARYIRLHPTHYSIRSTLRMELMGCDLNSCSMPLGMESKAISDAQITASSYFTNMFATWSPSKARLHLQGRSNAWRPQVNNPKEWLQVDFQKTMKVTGVTTQGVKSLLTSMYVKEFLISSSQDGHQWTLFFQNGKVKVFQGNQDSFTPVVNSLDPPLLTRYLRIHPQSWVHQIALRMEVLGCEAQDLYGAGSPGAETAEQKLISEEDLSPATG

SEQ ID NO: 735 - DNA, 4575 bp, Artificial Sequence
  Description of Artificial Sequence: Synthetic polynucleotide
atgcaaatagagctctccacctgcttctttctgtgccttttgcgattctgctttagtgccaccagaagatactacctgggtgcagtggaactgtcatgggactatatgcaaagtgatctcggtgagctgcctgtggacgcaagatttcctcctagagtgccaaaatcttttccattcaacacctcagtcgtgtacaaaaagactctgtttgtagaattcacggatcaccttttcaacatcgctaagccaaggccaccctggatgggtctgctaggtcctaccatccaggctgaggtttatgatacagtggtcattacacttaagaacatggcttcccatcctgtcagtcttcatgctgttggtgtatcctactggaaagcttctgagggagctgaatatgatgatcagaccagtcaaagggagaaagaagatgataaagtcttccctggtggaagccatacatatgtctggcaggtcctgaaagagaatggtccaatggcctctgacccactgtgccttacctactcatatctttctcatgtggacctggtaaaagacttgaattcaggcctcattggagccctactagtatgtagagaagggagtctggccaaggaaaagacacagaccttgcacaaatttatactactttttgctgtatttgatgaagggaaaagttggcactcagaaacaaagaactccttgatgcaggatagggatgctgcatctgctcgggcctggcctaaaatgcacacagtcaatggttatgtaaacaggtctctgccaggtctgattggatgccacaggaaatcagtctattggcatgtgattggaatgggcaccactcctgaagtgcactcaatattcctcgaaggtcacacatttcttgtgaggaaccatcgccaggctagcttggaaatctcgccaataactttccttactgctcaaacactcttgatggaccttggacagtttctactgttttgtcatatctcttcccaccaacatgatggcatggaagcttatgtcaaagtagacagctgtccagaggaaccccaactacgaatgaaaaataatgaagaagcggaagactatgatgatgatcttactgattctgaaatggatgtggtcaggtttgatgatgacaactctccttcctttatccaaattcgctcagttgccaagaagcatcctaaaacttgggtacattacattgctgctgaagaggaggactgggactatgctcccttagtcctcgcccccgatgacagaagttataaaagtcaatatttgaacaatggccctcagcggattggtaggaagtacaaaaaagtccgatttatggcatacacagatgaaacctttaagactcgtgaagctattcagcatgaatcaggaatcttgggacctttactttatggggaagttggagacacactgttgattatatttaagaatcaagcaagcagaccatataacatctaccctcacggaatcactgatgtccgtcctttgtattcaaggagattaccaaaaggtgtaaaacatttgaaggattttccaattctgccaggagaaatattcaaatataaatggacagtgactgtagaagatgggccaactaaatcagatcctcggtgcctgacccgctattactctagtttcgttaatatggagagagatctagcttcaggactcattggccctctcctcatctgctacaaagaatctgtagatcaaagaggaaaccagataatgtcagacaagaggaatgtcatcctgttttctgtatttgatgagaaccgaagctggtacctcacagagaatatacaacgctttctccccaatccagctggagtgcagcttgaggatccagagttccaagcctccaacatcatgcacagcatcaatggctatgtttttgatagtttgcagttgtcagtttgtttgcatgaggtggcatactggtacattctaagcattggagcacagactgacttcctttctgtcttcttctctggatataccttcaaacacaaaatggtctatgaagacacactcaccctattcccattctcaggagaaactgtcttcatgtcgatggaaaacccaggtctatggattctggggtgccacaactcagactttcggaacagaggcatgaccgccttactgaaggtttctagttgtgacaagggcgcgccaggttctcctgctggctcccccacctcaacagaagaggggacaagcgaaagcgctacgcctgagagtggccctggctctgagccagccacctccggctctgaaacccctgcctcgagcaacactggtgattattacgaggacagttatgaagatatttcagcatacttgctgagtaaaaacaatgccattgaaccaagaagcttctctcaaaacccaccagtcttgaaacgccatcaacgggaaataactcgtactactcttcagtcagatcaagaggaaatcgattatgatgataccatatcagttgaaatgaagaaggaagattttgacatttatgatgaggatgaaaatcagagcccccgcagctttcaaaagaaaacacgacactattttattgctgcagtggagaggctctgggattatgggatgagtagctccccacatgttctaagaaacagggctcagagtggcagtgtccctcagttcaagaaagttgttttccaggaatttactgatggctcctttactcagcccttataccgtggagaactaaatgaacatttgggactcctggggccatatataagagcagaagttgaagataatatcatggtaactttcagaaatcaggcctctcgtccctattccttctattctagccttatttcttatgaggaagatcagaggcaaggagcagaacctagaaaaaactttgtcaagcctaatgaaaccaaaacttacttttggaaagtgcaacatcatatggcacccactaaagatgagtttgactgcaaagcctgggcttatttctctgatgttgacctggaaaaagatgtgcactcaggcctgattggaccccttctggtctgccacactaacacactgaaccctgctcatgggagacaagtgacagtacaggaatttgctctgtttttcaccatctttgatgagaccaaaagctggtacttcactgaaaatatggaaagaaactgcagggctccctgcaatatccagatggaagatcccacttttaaagagaattatcgcttccatgcaatcaatggctacataatggatacactacctggcttagtaatggctcaggatcaaaggattcgatggtatctgctcagcatgggcagcaatgaaaacatccattctattcatttcagtggacatgtgttcactgtacgaaaaaaagaggagtataaaatggcactgtacaatctctatccaggtgtttttgagacagtggaaatgttaccatccaaagctggaatttggcgggtggaatgccttattggcgagcatctacatgctgggatgagcacactttttctggtgtacagcaataagtgtcagactcccctgggaatggcttctggacacattagagattttcagattacagcttcaggacaatatggacagtgggccccaaagctggccagacttcattattccggatcaatcaatgcctggagcaccaaggagcccttttcttggatcaaggtggatctgttggcaccaatgattattcacggcatcaagacccagggtgcccgtcagaagttctccagcctctacatctctcagtttatcatcatgtatagtcttgatgggaagaagtggcagacttatcgaggaaattccactggaaccttaatggtcttctttggcaatgtggattcatctgggataaaacacaatatttttaaccctccaattattgctcgatacatccgtttgcacccaactcattatagcattcgcagcactcttcgcatggagttgatgggctgtgatttaaatagttgcagcatgccattgggaatggagagtaaagcaatatcagatgcacagattactgcttcatcctactttaccaatatgtttgccacctggtctccttcaaaagctcgacttcacctccaagggaggagtaatgcctggagacctcaggtgaataatccaaaagagtggctgcaagtggacttccagaagacaatgaaagtcacaggagtaactactcagggagtaaaatctctgcttaccagcatgtatgtgaaggagttcctcatctccagcagtcaagatggccatcagtggactctcttttttcagaatggcaaagtaaaggtttttcagggaaatcaagactccttcacacctgtggtgaactctctagacccaccgttactgactcgctaccttcgaattcacccccagagttgggtgcaccagattgccctgaggatggaggttctgggctgcgaggcacaggacctctacggcgccggatcacctggggccgaaacggccgaacaaaaactcatctcagaagaggatctgtcacctgcaaccggttga

SEQ ID NO: 736 - protein, 1524 aa, Artificial Sequence
  Description of Artificial Sequence: Synthetic polypeptide
MQIELSTCFFLCLLRFCFSATRRYYLGAVELSWDYMQSDLGELPVDARFPPRVPKSFPFNTSVVYKKTLFVEFTDHLFNIAKPRPPWMGLLGPTIQAEVYDTVVITLKNMASHPVSLHAVGVSYWKASEGAEYDDQTSQREKEDDKVFPGGSHTYVWQVLKENGPMASDPLCLTYSYLSHVDLVKDLNSGLIGALLVCREGSLAKEKTQTLHKFILLFAVFDEGKSWHSETKNSLMQDRDAASARAWPKMHTVNGYVNRSLPGLIGCHRKSVYWHVIGMGTTPEVHSIFLEGHTFLVRNHRQASLEISPITFLTAQTLLMDLGQFLLFCHISSHQHDGMEAYVKVDSCPEEPQLRMKNNEEAEDYDDDLTDSEMDVVRFDDDNSPSFIQIRSVAKKHPKTWVHYIAAEEEDWDYAPLVLAPDDRSYKSQYLNNGPQRIGRKYKKVRFMAYTDETFKTREAIQHESGILGPLLYGEVGDTLLIIFKNQASRPYNIYPHGITDVRPLYSRRLPKGVKHLKDFPILPGEIFKYKWTVTVEDGPTKSDPRCLTRYYSSFVNMERDLASGLIGPLLICYKESVDQRGNQIMSDKRNVILFSVFDENRSWYLTENIQRFLPNPAGVQLEDPEFQASNIMHSINGYVFDSLQLSVCLHEVAYWYILSIGAQTDFLSVFFSGYTFKHKMVYEDTLTLFPFSGETVFMSMENPGLWILGCHNSDFRNRGMTALLKVSSCDKNTGDYYEDSYEDISAYLLSKNNAIEPRSFSQNGAPGSPAGSPTSTEEGTSESATPESGPGSEPATSGSETPASSPPVLKRHQREITRTTLQSDQEEIDYDDTISVEMKKEDFDIYDEDENQSPRSFQKKTRHYFIAAVERLWDYGMSSSPHVLRNRAQSGSVPQFKKVVFQEFTDGSFTQPLYRGELNEHLGLLGPYIRAEVEDNIMVTFRNQASRPYSFYSSLISYEEDQRQGAEPRKNFVKPNETKTYFWKVQHHMAPTKDEFDCKAWAYFSDVDLEKDVHSGLIGPLLVCHTNTLNPAHGRQVTVQEFALFFTIFDETKSWYFTENMERNCRAPCNIQMEDPTFKENYRFHAINGYIMDTLPGLVMAQDQRIRWYLLSMGSNENIHSIHFSGHVFTVRKKEEYKMALYNLYPGVFETVEMLPSKAGIWRVECLIGEHLHAGMSTLFLVYSNKCQTPLGMASGHIRDFQITASGQYGQWAPKLARLHYSGSINAWSTKEPFSWIKVDLLAPMIIHGIKTQGARQKFSSLYISQFIIMYSLDGKKWQTYRGNSTGTLMVFFGNVDSSGIKHNIFNPPIIARYIRLHPTHYSIRSTLRMELMGCDLNSCSMPLGMESKAISDAQITASSYFTNMFATWSPSKARLHLQGRSNAWRPQVNNPKEWLQVDFQKTMKVTGVTTQGVKSLLTSMYVKEFLISSSQDGHQWTLFFQNGKVKVFQGNQDSFTPVVNSLDPPLLTRYLRIHPQSWVHQIALRMEVLGCEAQDLYGAGSPGAETAEQKLISEEDLSPATG

SEQ ID NO: 737 - DNA, 4575 bp, Artificial Sequence
  Description of Artificial Sequence: Synthetic polynucleotide
atgcaaatagagctctccacctgcttctttctgtgccttttgcgattctgctttagtgccaccagaagatactacctgggtgcagtggaactgtcatgggactatatgcaaagtgatctcggtgagctgcctgtggacgcaagatttcctcctagagtgccaaaatcttttccattcaacacctcagtcgtgtacaaaaagactctgtttgtagaattcacggatcaccttttcaacatcgctaagccaaggccaccctggatgggtctgctaggtcctaccatccaggctgaggtttatgatacagtggtcattacacttaagaacatggcttcccatcctgtcagtcttcatgctgttggtgtatcctactggaaagcttctgagggagctgaatatgatgatcagaccagtcaaagggagaaagaagatgataaagtcttccctggtggaagccatacatatgtctggcaggtcctgaaagagaatggtccaatggcctctgacccactgtgccttacctactcatatctttctcatgtggacctggtaaaagacttgaattcaggcctcattggagccctactagtatgtagagaagggagtctggccaaggaaaagacacagaccttgcacaaatttatactactttttgctgtatttgatgaagggaaaagttggcactcagaaacaaagaactccttgatgcaggatagggatgctgcatctgctcgggcctggcctaaaatgcacacagtcaatggttatgtaaacaggtctctgccaggtctgattggatgccacaggaaatcagtctattggcatgtgattggaatgggcaccactcctgaagtgcactcaatattcctcgaaggtcacacatttcttgtgaggaaccatcgccaggctagcttggaaatctcgccaataactttccttactgctcaaacactcttgatggaccttggacagtttctactgttttgtcatatctcttcccaccaacatgatggcatggaagcttatgtcaaagtagacagctgtccagaggaaccccaactacgaatgaaaaataatgaagaagcggaagactatgatgatgatcttactgattctgaaatggatgtggtcaggtttgatgatgacaactctccttcctttatccaaattcgctcagttgccaagaagcatcctaaaacttgggtacattacattgctgctgaagaggaggactgggactatgctcccttagtcctcgcccccgatgacagaagttataaaagtcaatatttgaacaatggccctcagcggattggtaggaagtacaaaaaagtccgatttatggcatacacagatgaaacctttaagactcgtgaagctattcagcatgaatcaggaatcttgggacctttactttatggggaagttggagacacactgttgattatatttaagaatcaagcaagcagaccatataacatctaccctcacggaatcactgatgtccgtcctttgtattcaaggagattaccaaaaggtgtaaaacatttgaaggattttccaattctgccaggagaaatattcaaatataaatggacagtgactgtagaagatgggccaactaaatcagatcctcggtgcctgacccgctattactctagtttcgttaatatggagagagatctagcttcaggactcattggccctctcctcatctgctacaaagaatctgtagatcaaagaggaaaccagataatgtcagacaagaggaatgtcatcctgttttctgtatttgatgagaaccgaagctggtacctcacagagaatatacaacgctttctccccaatccagctggagtgcagcttgaggatccagagttccaagcctccaacatcatgcacagcatcaatggctatgtttttgatagtttgcagttgtcagtttgtttgcatgaggtggcatactggtacattctaagcattggagcacagactgacttcctttctgtcttcttctctggatataccttcaaacacaaaatggtctatgaagacacactcaccctattcccattctcaggagaaactgtcttcatgtcgatggaaaacccaggtctatggattctggggtgccacaactcagactttcggaacagaggcatgaccgccttactgaaggtttctagttgtgacaagaacactggtgattattacgaggacagttatgaagatatttcagcatacttgctgagtaaaaacaatgccattgaaccaagaagcttctctcaaaacggcgcgccaggttctcctgctggctcccccacctcaacagaagaggggacaagcgaaagcgctacgcctgagagtggccctggctctgagccagccacctccggctctgaaacccctgcctcgagcccaccagtcttgaaacgccatcaacgggaaataactcgtactactcttcagtcagatcaagaggaaatcgattatgatgataccatatcagttgaaatgaagaaggaagattttgacatttatgatgaggatgaaaatcagagcccccgcagctttcaaaagaaaacacgacactattttattgctgcagtggagaggctctgggattatgggatgagtagctccccacatgttctaagaaacagggctcagagtggcagtgtccctcagttcaagaaagttgttttccaggaatttactgatggctcctttactcagcccttataccgtggagaactaaatgaacatttgggactcctggggccatatataagagcagaagttgaagataatatcatggtaactttcagaaatcaggcctctcgtccctattccttctattctagccttatttcttatgaggaagatcagaggcaaggagcagaacctagaaaaaactttgtcaagcctaatgaaaccaaaacttacttttggaaagtgcaacatcatatggcacccactaaagatgagtttgactgcaaagcctgggcttatttctctgatgttgacctggaaaaagatgtgcactcaggcctgattggaccccttctggtctgccacactaacacactgaaccctgctcatgggagacaagtgacagtacaggaatttgctctgtttttcaccatctttgatgagaccaaaagctggtacttcactgaaaatatggaaagaaactgcagggctccctgcaatatccagatggaagatcccacttttaaagagaattatcgcttccatgcaatcaatggctacataatggatacactacctggcttagtaatggctcaggatcaaaggattcgatggtatctgctcagcatgggcagcaatgaaaacatccattctattcatttcagtggacatgtgttcactgtacgaaaaaaagaggagtataaaatggcactgtacaatctctatccaggtgtttttgagacagtggaaatgttaccatccaaagctggaatttggcgggtggaatgccttattggcgagcatctacatgctgggatgagcacactttttctggtgtacagcaataagtgtcagactcccctgggaatggcttctggacacattagagattttcagattacagcttcaggacaatatggacagtgggccccaaagctggccagacttcattattccggatcaatcaatgcctggagcaccaaggagcccttttcttggatcaaggtggatctgttggcaccaatgattattcacggcatcaagacccagggtgcccgtcagaagttctccagcctctacatctctcagtttatcatcatgtatagtcttgatgggaagaagtggcagacttatcgaggaaattccactggaaccttaatggtcttctttggcaatgtggattcatctgggataaaacacaatatttttaaccctccaattattgctcgatacatccgtttgcacccaactcattatagcattcgcagcactcttcgcatggagttgatgggctgtgatttaaatagttgcagcatgccattgggaatggagagtaaagcaatatcagatgcacagattactgcttcatcctactttaccaatatgtttgccacctggtctccttcaaaagctcgacttcacctccaagggaggagtaatgcctggagacctcaggtgaataatccaaaagagtggctgcaagtggacttccagaagacaatgaaagtcacaggagtaactactcagggagtaaaatctctgcttaccagcatgtatgtgaaggagttcctcatctccagcagtcaagatggccatcagtggactctcttttttcagaatggcaaagtaaaggtttttcagggaaatcaagactccttcacacctgtggtgaactctctagacccaccgttactgactcgctaccttcgaattcacccccagagttgggtgcaccagattgccctgaggatggaggttctgggctgcgaggcacaggacctctacggcgccggatcacctggggccgaaacggccgaacaaaaactcatctcagaagaggatctgtcacctgcaaccggttga

SEQ ID NO: 738 - protein, 1524 aa, Artificial Sequence
  Description of Artificial Sequence: Synthetic polypeptide
MQIELSTCFFLCLLRFCFSATRRYYLGAVELSWDYMQSDLGELPVDARFPPRVPKSFPFNTSVVYKKTLFVEFTDHLFNIAKPRPPWMGLLGPTIQAEVYDTVVITLKNMASHPVSLHAVGVSYWKASEGAEYDDQTSQREKEDDKVFPGGSHTYVWQVLKENGPMASDPLCLTYSYLSHVDLVKDLNSGLIGALLVCREGSLAKEKTQTLHKFILLFAVFDEGKSWHSETKNSLMQDRDAASARAWPKMHTVNGYVNRSLPGLIGCHRKSVYWHVIGMGTTPEVHSIFLEGHTFLVRNHRQASLEISPITFLTAQTLLMDLGQFLLFCHISSHQHDGMEAYVKVDSCPEEPQLRMKNNEEAEDYDDDLTDSEMDVVRFDDDNSPSFIQIRSVAKKHPKTWVHYIAAEEEDWDYAPLVLAPDDRSYKSQYLNNGPQRIGRKYKKVRFMAYTDETFKTREAIQHESGILGPLLYGEVGDTLLIIFKNQASRPYNIYPHGITDVRPLYSRRLPKGVKHLKDFPILPGEIFKYKWTVTVEDGPTKSDPRCLTRYYSSFVNMERDLASGLIGPLLICYKESVDQRGNQIMSDKRNVILFSVFDENRSWYLTENIQRFLPNPAGVQLEDPEFQASNIMHSINGYVFDSLQLSVCLHEVAYWYILSIGAQTDFLSVFFSGYTFKHKMVYEDTLTLFPFSGETVFMSMENPGLWILGCHNSDFRNRGMTALLKVSSCDKNTGDYYEDSYEDISAYLLSKNNAIEPRSFSGAPGSPAGSPTSTEEGTSESATPESGPGSEPATSGSETPASSQNPPVLKRHQREITRTTLQSDQEEIDYDDTISVEMKKEDFDIYDEDENQSPRSFQKKTRHYFIAAVERLWDYGMSSSPHVLRNRAQSGSVPQFKKVVFQEFTDGSFTQPLYRGELNEHLGLLGPYIRAEVEDNIMVTFRNQASRPYSFYSSLISYEEDQRQGAEPRKNFVKPNETKTYFWKVQHHMAPTKDEFDCKAWAYFSDVDLEKDVHSGLIGPLLVCHTNTLNPAHGRQVTVQEFALFFTIFDETKSWYFTENMERNCRAPCNIQMEDPTFKENYRFHAINGYIMDTLPGLVMAQDQRIRWYLLSMGSNENIHSIHFSGHVFTVRKKEEYKMALYNLYPGVFETVEMLPSKAGIWRVECLIGEHLHAGMSTLFLVYSNKCQTPLGMASGHIRDFQITASGQYGQWAPKLARLHYSGSINAWSTKEPFSWIKVDLLAPMIIHGIKTQGARQKFSSLYISQFIIMYSLDGKKWQTYRGNSTGTLMVFFGNVDSSGIKHNIFNPPIIARYIRLHPTHYSIRSTLRMELMGCDLNSCSMPLGMESKAISDAQITASSYFTNMFATWSPSKARLHLQGRSNAWRPQVNNPKEWLQVDFQKTMKVTGVTTQGVKSLLTSMYVKEFLISSSQDGHQWTLFFQNGKVKVFQGNQDSFTPVVNSLDPPLLTRYLRIHPQSWVHQIALRMEVLGCEAQDLYGAGSPGAETAEQKLISEEDLSPATG

SEQ ID NO: 739 - DNA, 4575 bp, Artificial Sequence
  Description of Artificial Sequence: Synthetic polynucleotide
atgcaaatagagctctccacctgcttctttctgtgccttttgcgattctgctttagtgccaccagaagatactacctgggtgcagtggaactgtcatgggactatatgcaaagtgatctcggtgagctgcctgtggacgcaagatttcctcctagagtgccaaaatcttttccattcaacacctcagtcgtgtacaaaaagactctgtttgtagaattcacggatcaccttttcaacatcgctaagccaaggccaccctggatgggtctgctaggtcctaccatccaggctgaggtttatgatacagtggtcattacacttaagaacatggcttcccatcctgtcagtcttcatgctgttggtgtatcctactggaaagcttctgagggagctgaatatgatgatcagaccagtcaaagggagaaagaagatgataaagtcttccctggtggaagccatacatatgtctggcaggtcctgaaagagaatggtccaatggcctctgacccactgtgccttacctactcatatctttctcatgtggacctggtaaaagacttgaattcaggcctcattggagccctactagtatgtagagaagggagtctggccaaggaaaagacacagaccttgcacaaatttatactactttttgctgtatttgatgaagggaaaagttggcactcagaaacaaagaactccttgatgcaggatagggatgctgcatctgctcgggcctggcctaaaatgcacacagtcaatggttatgtaaacaggtctctgccaggtctgattggatgccacaggaaatcagtctattggcatgtgattggaatgggcaccactcctgaagtgcactcaatattcctcgaaggtcacacatttcttgtgaggaaccatcgccaggctagcttggaaatctcgccaataactttccttactgctcaaacactcttgatggaccttggacagtttctactgttttgtcatatctcttcccaccaacatgatggcatggaagcttatgtcaaagtagacagctgtccagaggaaccccaactacgaatgaaaaataatgaagaagcggaagactatgatgatgatcttactgattctgaaatggatgtggtcaggtttgatgatgacaactctccttcctttatccaaattcgctcagttgccaagaagcatcctaaaacttgggtacattacattgctgctgaagaggaggactgggactatgctcccttagtcctcgcccccgatgacagaagttataaaagtcaatatttgaacaatggccctcagcggattggtaggaagtacaaaaaagtccgatttatggcatacacagatgaaacctttaagactcgtgaagctattcagcatgaatcaggaatcttgggacctttactttatggggaagttggagacacactgttgattatatttaagaatcaagcaagcagaccatataacatctaccctcacggaatcactgatgtccgtcctttgtattcaaggagattaccaaaaggtgtaaaacatttgaaggattttccaattctgccaggagaaatattcaaatataaatggacagtgactgtagaagatgggccaactaaatcagatcctcggtgcctgacccgctattactctagtttcgttaatatggagagagatctagcttcaggactcattggccctctcctcatctgctacaaagaatctgtagatcaaagaggaaaccagataatgtcagacaagaggaatgtcatcctgttttctgtatttgatgagaaccgaagctggtacctcacagagaatatacaacgctttctccccaatccagctggagtgcagcttgaggatccagagttccaagcctccaacatcatgcacagcatcaatggctatgtttttgatagtttgcagttgtcagtttgtttgcatgaggtggcatactggtacattctaagcattggagcacagactgacttcctttctgtcttcttctctggatataccttcaaacacaaaatggtctatgaagacacactcaccctattcccattctcaggagaaactgtcttcatgtcgatggaaaacccaggtctatggattctggggtgccacaactcagactttcggaacagaggcatgaccgccttactgaaggtttctagttgtgacaagaacactggtgattattacgaggacagttatgaagatatttcagcatacttgctgagtaaaaacaatgccattgaaccaagaagcttctctggcgcgccaggttctcctgctggctcccccacctcaacagaagaggggacaagcgaaagcgctacgcctgagagtggccctggctctgagccagccacctccggctctgaaacccctgcctcgagccaaaacccaccagtcttgaaacgccatcaacgggaaataactcgtactactcttcagtcagatcaagaggaaatcgattatgatgataccatatcagttgaaatgaagaaggaagattttgacatttatgatgaggatgaaaatcagagcccccgcagctttcaaaagaaaacacgacactattttattgctgcagtggagaggctctgggattatgggatgagtagctccccacatgttctaagaaacagggctcagagtggcagtgtccctcagttcaagaaagttgttttccaggaatttactgatggctcctttactcagcccttataccgtggagaactaaatgaacatttgggactcctggggccatatataagagcagaagttgaagataatatcatggtaactttcagaaatcaggcctctcgtccctattccttctattctagccttatttcttatgaggaagatcagaggcaaggagcagaacctagaaaaaactttgtcaagcctaatgaaaccaaaacttacttttggaaagtgcaacatcatatggcacccactaaagatgagtttgactgcaaagcctgggcttatttctctgatgttgacctggaaaaagatgtgcactcaggcctgattggaccccttctggtctgccacactaacacactgaaccctgctcatgggagacaagtgacagtacaggaatttgctctgtttttcaccatctttgatgagaccaaaagctggtacttcactgaaaatatggaaagaaactgcagggctccctgcaatatccagatggaagatcccacttttaaagagaattatcgcttccatgcaatcaatggctacataatggatacactacctggcttagtaatggctcaggatcaaaggattcgatggtatctgctcagcatgggcagcaatgaaaacatccattctattcatttcagtggacatgtgttcactgtacgaaaaaaagaggagtataaaatggcactgtacaatctctatccaggtgtttttgagacagtggaaatgttaccatccaaagctggaatttggcgggtggaatgccttattggcgagcatctacatgctgggatgagcacactttttctggtgtacagcaataagtgtcagactcccctgggaatggcttctggacacattagagattttcagattacagcttcaggacaatatggacagtgggccccaaagctggccagacttcattattccggatcaatcaatgcctggagcaccaaggagcccttttcttggatcaaggtggatctgttggcaccaatgattattcacggcatcaagacccagggtgcccgtcagaagttctccagcctctacatctctcagtttatcatcatgtatagtcttgatgggaagaagtggcagacttatcgaggaaattccactggaaccttaatggtcttctttggcaatgtggattcatctgggataaaacacaatatttttaaccctccaattattgctcgatacatccgtttgcacccaactcattatagcattcgcagcactcttcgcatggagttgatgggctgtgatttaaatagttgcagcatgccattgggaatggagagtaaagcaatatcagatgcacagattactgcttcatcctactttaccaatatgtttgccacctggtctccttcaaaagctcgacttcacctccaagggaggagtaatgcctggagacctcaggtgaataatccaaaagagtggctgcaagtggacttccagaagacaatgaaagtcacaggagtaactactcagggagtaaaatctctgcttaccagcatgtatgtgaaggagttcctcatctccagcagtcaagatggccatcagtggactctcttttttcagaatggcaaagtaaaggtttttcagggaaatcaagactccttcacacctgtggtgaactctctagacccaccgttactgactcgctaccttcgaattcacccccagagttgggtgcaccagattgccctgaggatggaggttctgggctgcgaggcacaggacctctacggcgccggatcacctggggccgaaacggccgaacaaaaactcatctcagaagaggatctgtcacctgcaaccggttga

SEQ ID NO: 740 - protein, 1524 aa, Artificial Sequence
  Description of Artificial Sequence: Synthetic polypeptide
MQIELSTCFFLCLLRFCFSATRRYYLGAVELSWDYMQSDLGELPVDARFPPRVPKSFPFNTSVVYKKTLFVEFTDHLFNIAKPRPPWMGLLGPTIQAEVYDTVVITLKNMASHPVSLHAVGVSYWKASEGAEYDDQTSQREKEDDKVFPGGSHTYVWQVLKENGPMASDPLCLTYSYLSHVDLVKDLNSGLIGALLVCREGSLAKEKTQTLHKFILLFAVFDEGKSWHSETKNSLMQDRDAASARAWPKMHTVNGYVNRSLPGLIGCHRKSVYWHVIGMGTTPEVHSIFLEGHTFLVRNHRQASLEISPITFLTAQTLLMDLGQFLLFCHISSHQHDGMEAYVKVDSCPEEPQLRMKNNEEAEDYDDDLTDSEMDVVRFDDDNSPSFIQIRSVAKKHPKTWVHYIAAEEEDWDYAPLVLAPDDRSYKSQYLNNGPQRIGRKYKKVRFMAYTDETFKTREAIQHESGILGPLLYGEVGDTLLIIFKNQASRPYNIYPHGITDVRPLYSRRLPKGVKHLKDFPILPGEIFKYKWTVTVEDGPTKSDPRCLTRYYSSFVNMERDLASGLIGPLLICYKESVDQRGNQIMSDKRNVILFSVFDENRSWYLTENIQRFLPNPAGVQLEDPEFQASNIMHSINGYVFDSLQLSVCLHEVAYWYILSIGAQTDFLSVFFSGYTFKHKMVYEDTLTLFPFSGETVFMSMENPGLWILGCHNSDFRNRGMTALLKVSSCDKNTGDYYEDSYEDISAYLLSKNNAIEPRSFSQNGAPGSPAGSPTSTEEGTSESATPESGPGSEPATSGSETPASSPPVLKRHQAEITRTTLQSDQEEIDYDDTISVEMKKEDFDIYDEDENQSPRSFQKKTRHYFIAAVERLWDYGMSSSPHVLRNRAQSGSVPQFKKVVFQEFTDGSFTQPLYRGELNEHLGLLGPYIRAEVEDNIMVTFRNQASRPYSFYSSLISYEEDQRQGAEPRKNFVKPNETKTYFWKVQHHMAPTKDEFDCKAWAYFSDVDLEKDVHSGLIGPLLVCHTNTLNPAHGRQVTVQEFALFFTIFDETKSWYFTENMERNCRAPCNIQMEDPTFKENYRFHAINGYIMDTLPGLVMAQDQRIRWYLLSMGSNENIHSIHFSGHVFTVRKKEEYKMALYNLYPGVFETVEMLPSKAGIWRVECLIGEHLHAGMSTLFLVYSNKCQTPLGMASGHIRDFQITASGQYGQWAPKLARLHYSGSINAWSTKEPFSWIKVDLLAPMIIHGIKTQGARQKFSSLYISQFIIMYSLDGKKWQTYRGNSTGTLMVFFGNVDSSGIKHNIFNPPIIARYIRLHPTHYSIRSTLRMELMGCDLNSCSMPLGMESKAISDAQITASSYFTNMFATWSPSKARLHLQGRSNAWRPQVNNPKEWLQVDFQKTMKVTGVTTQGVKSLLTSMYVKEFLISSSQDGHQWTLFFQNGKVKVFQGNQDSFTPVVNSLDPPLLTRYLRIHPQSWVHQIALRMEVLGCEAQDLYGAGSPGAETAEQKLISEEDLSPATG

SEQ ID NO: 741 - DNA, 4575 bp, Artificial Sequence
  Description of Artificial Sequence: Synthetic polynucleotide
atgcaaatagagctctccacctgcttctttctgtgccttttgcgattctgctttagtgccaccagaagatactacctgggtgcagtggaactgtcatgggactatatgcaaagtgatctcggtgagctgcctgtggacgcaagatttcctcctagagtgccaaaatcttttccattcaacacctcagtcgtgtacaaaaagactctgtttgtagaattcacggatcaccttttcaacatcgctaagccaaggccaccctggatgggtctgctaggtcctaccatccaggctgaggtttatgatacagtggtcattacacttaagaacatggcttcccatcctgtcagtcttcatgctgttggtgtatcctactggaaagcttctgagggagctgaatatgatgatcagaccagtcaaagggagaaagaagatgataaagtcttccctggtggaagccatacatatgtctggcaggtcctgaaagagaatggtccaatggcctctgacccactgtgccttacctactcatatctttctcatgtggacctggtaaaagacttgaattcaggcctcattggagccctactagtatgtagagaagggagtctggccaaggaaaagacacagaccttgcacaaatttatactactttttgctgtatttgatgaagggaaaagttggcactcagaaacaaagaactccttgatgcaggatagggatgctgcatctgctcgggcctggcctaaaatgcacacagtcaatggttatgtaaacaggtctctgccaggtctgattggatgccacaggaaatcagtctattggcatgtgattggaatgggcaccactcctgaagtgcactcaatattcctcgaaggtcacacatttcttgtgaggaaccatcgccaggctagcttggaaatctcgccaataactttccttactgctcaaacactcttgatggaccttggacagtttctactgttttgtcatatctcttcccaccaacatgatggcatggaagcttatgtcaaagtagacagctgtccagaggaaccccaactacgaatgaaaaataatgaagaagcggaagactatgatgatgatcttactgattctgaaatggatgtggtcaggtttgatgatgacaactctccttcctttatccaaattcgctcagttgccaagaagcatcctaaaacttgggtacattacattgctgctgaagaggaggactgggactatgctcccttagtcctcgcccccgatgacagaagttataaaagtcaatatttgaacaatggccctcagcggattggtaggaagtacaaaaaagtccgatttatggcatacacagatgaaacctttaagactcgtgaagctattcagcatgaatcaggaatcttgggacctttactttatggggaagttggagacacactgttgattatatttaagaatcaagcaagcagaccatataacatctaccctcacggaatcactgatgtccgtcctttgtattcaaggagattaccaaaaggtgtaaaacatttgaaggattttccaattctgccaggagaaatattcaaatataaatggacagtgactgtagaagatgggccaactaaatcagatcctcggtgcctgacccgctattactctagtttcgttaatatggagagagatctagcttcaggactcattggccctctcctcatctgctacaaagaatctgtagatcaaagaggaaaccagataatgtcagacaagaggaatgtcatcctgttttctgtatttgatgagaaccgaagctggtacctcacagagaatatacaacgctttctccccaatccagctggagtgcagcttgaggatccagagttccaagcctccaacatcatgcacagcatcaatggctatgtttttgatagtttgcagttgtcagtttgtttgcatgaggtggcatactggtacattctaagcattggagcacagactgacttcctttctgtcttcttctctggatataccttcaaacacaaaatggtctatgaagacacactcaccctattcccattctcaggagaaactgtcttcatgtcgatggaaaacccaggtctatggattctggggtgccacaactcagactttcggaacagaggcatgaccgccttactgaaggtttctagttgtgacaagaacactggtgattattacgaggacagttatgaagatatttcagcatacttgctgagtaaaaacaatgccattgaaccaagaagcttctctcaaaacggcgcgccaggttctcctgctggctcccccacctcaacagaagaggggacaagcgaaagcgctacgcctgagagtggccctggctctgagccagccacctccggctctgaaacccctgcctcgagcccaccagtcttgaaacgccatcaagctgaaataactcgtactactcttcagtcagatcaagaggaaatcgattatgatgataccatatcagttgaaatgaagaaggaagattttgacatttatgatgaggatgaaaatcagagcccccgcagctttcaaaagaaaacacgacactattttattgctgcagtggagaggctctgggattatgggatgagtagctccccacatgttctaagaaacagggctcagagtggcagtgtccctcagttcaagaaagttgttttccaggaatttactgatggctcctttactcagcccttataccgtggagaactaaatgaacatttgggactcctggggccatatataagagcagaagttgaagataatatcatggtaactttcagaaatcaggcctctcgtccctattccttctattctagccttatttcttatgaggaagatcagaggcaaggagcagaacctagaaaaaactttgtcaagcctaatgaaaccaaaacttacttttggaaagtgcaacatcatatggcacccactaaagatgagtttgactgcaaagcctgggcttatttctctgatgttgacctggaaaaagatgtgcactcaggcctgattggaccccttctggtctgccacactaacacactgaaccctgctcatgggagacaagtgacagtacaggaatttgctctgtttttcaccatctttgatgagaccaaaagctggtacttcactgaaaatatggaaagaaactgcagggctccctgcaatatccagatggaagatcccacttttaaagagaattatcgcttccatgcaatcaatggctacataatggatacactacctggcttagtaatggctcaggatcaaaggattcgatggtatctgctcagcatgggcagcaatgaaaacatccattctattcatttcagtggacatgtgttcactgtacgaaaaaaagaggagtataaaatggcactgtacaatctctatccaggtgtttttgagacagtggaaatgttaccatccaaagctggaatttggcgggtggaatgccttattggcgagcatctacatgctgggatgagcacactttttctggtgtacagcaataagtgtcagactcccctgggaatggcttctggacacattagagattttcagattacagcttcaggacaatatggacagtgggccccaaagctggccagacttcattattccggatcaatcaatgcctggagcaccaaggagcccttttcttggatcaaggtggatctgttggcaccaatgattattcacggcatcaagacccagggtgcccgtcagaagttctccagcctctacatctctcagtttatcatcatgtatagtcttgatgggaagaagtggcagacttatcgaggaaattccactggaaccttaatggtcttctttggcaatgtggattcatctgggataaaacacaatatttttaaccctccaattattgctcgatacatccgtttgcacccaactcattatagcattcgcagcactcttcgcatggagttgatgggctgtgatttaaatagttgcagcatgccattgggaatggagagtaaagcaatatcagatgcacagattactgcttcatcctactttaccaatatgtttgccacctggtctccttcaaaagctcgacttcacctccaagggaggagtaatgcctggagacctcaggtgaataatccaaaagagtggctgcaagtggacttccagaagacaatgaaagtcacaggagtaactactcagggagtaaaatctctgcttaccagcatgtatgtgaaggagttcctcatctccagcagtcaagatggccatcagtggactctcttttttcagaatggcaaagtaaaggtttttcagggaaatcaagactccttcacacctgtggtgaactctctagacccaccgttactgactcgctaccttcgaattcacccccagagttgggtgcaccagattgccctgaggatggaggttctgggctgcgaggcacaggacctctacggcgccggatcacctggggccgaaacggccgaacaaaaactcatctcagaagaggatctgtcacctgcaaccggttga

SEQ ID NO: 742 - protein, 1524 aa, Artificial Sequence
  Description of Artificial Sequence: Synthetic polypeptide
MQIELSTCFFLCLLRFCFSATRRYYLGAVELSWDYMQSDLGELPVDARFPPRVPKSFPFNTSVVYKKTLFVEFTDHLFNIAKPRPPWMGLLGPTIQAEVYDTVVITLKNMASHPVSLHAVGVSYWKASEGAEYDDQTSQREKEDDKVFPGGSHTYVWQVLKENGPMASDPLCLTYSYLSHVDLVKDLNSGLIGALLVCREGSLAKEKTQTLHKFILLFAVFDEGKSWHSETKNSLMQDRDAASARAWPKMHTVNGYVNRSLPGLIGCHRKSVYWHVIGMGTTPEVHSIFLEGHTFLVRNHRQASLEISPITFLTAQTLLMDLGQFLLFCHISSHQHDGMEAYVKVDSCPEEPQLRMKNNEEAEDYDDDLTDSEMDVVRFDDDNSPSFIQIRSVAKKHPKTWVHYIAAEEEDWDYAPLVLAPDDRSYKSQYLNNGPQRIGRKYKKVRFMAYTDETFKTREAIQHESGILGPLLYGEVGDTLLIIFKNQASRPYNIYPHGITDVRPLYSRRLPKGVKHLKDFPILPGEIFKYKWTVTVEDGPTKSDPRCLTRYYSSFVNMERDLASGLIGPLLICYKESVDQRGNQIMSDKRNVILFSVFDENRSWYLTENIQRFLPNPAGVQLEDPEFQASNIMHSINGYVFDSLQLSVCLHEVAYWYILSIGAQTDFLSVFFSGYTFKHKMVYEDTLTLFPFSGETVFMSMENPGLWILGCHNSDFRNRGMTALLKVSSCDKNTGDYYEDSYEDISAYLLSKNNAIEPRSFSGAPGSPAGSPTSTEEGTSESATPESGPGSEPATSGSETPASSQNPPVLKRHQAEITRTTLQSDQEEIDYDDTISVEMKKEDFDIYDEDENQSPRSFQKKTRHYFIAAVERLWDYGMSSSPHVLRNRAQSGSVPQFKKVVFQEFTDGSFTQPLYRGELNEHLGLLGPYIRAEVEDNIMVTFRNQASRPYSFYSSLISYEEDQRQGAEPRKNFVKPNETKTYFWKVQHHMAPTKDEFDCKAWAYFSDVDLEKDVHSGLIGPLLVCHTNTLNPAHGRQVTVQEFALFFTIFDETKSWYFTENMERNCRAPCNIQMEDPTFKENYRFHAINGYIMDTLPGLVMAQDQRIRWYLLSMGSNENIHSIHFSGHVFTVRKKEEYKMALYNLYPGVFETVEMLPSKAGIWRVECLIGEHLHAGMSTLFLVYSNKCQTPLGMASGHIRDFQITASGQYGQWAPKLARLHYSGSINAWSTKEPFSWIKVDLLAPMIIHGIKTQGARQKFSSLYISQFIIMYSLDGKKWQTYRGNSTGTLMVFFGNVDSSGIKHNIFNPPIIARYIRLHPTHYSIRSTLRMELMGCDLNSCSMPLGMESKAISDAQITASSYFTNMFATWSPSKARLHLQGRSNAWRPQVNNPKEWLQVDFQKTMKVTGVTTQGVKSLLTSMYVKEFLISSSQDGHQWTLFFQNGKVKVFQGNQDSFTPVVNSLDPPLLTRYLRIHPQSWVHQIALRMEVLGCEAQDLYGAGSPGAETAEQKLISEEDLSPATG

SEQ ID NO: 743 - DNA, 4575 bp, Artificial Sequence
  Description of Artificial Sequence: Synthetic polynucleotide
atgcaaatagagctctccacctgcttctttctgtgccttttgcgattctgctttagtgccaccagaagatactacctgggtgcagtggaactgtcatgggactatatgcaaagtgatctcggtgagctgcctgtggacgcaagatttcctcctagagtgccaaaatcttttccattcaacacctcagtcgtgtacaaaaagactctgtttgtagaattcacggatcaccttttcaacatcgctaagccaaggccaccctggatgggtctgctaggtcctaccatccaggctgaggtttatgatacagtggtcattacacttaagaacatggcttcccatcctgtcagtcttcatgctgttggtgtatcctactggaaagcttctgagggagctgaatatgatgatcagaccagtcaaagggagaaagaagatgataaagtcttccctggtggaagccatacatatgtctggcaggtcctgaaagagaatggtccaatggcctctgacccactgtgccttacctactcatatctttctcatgtggacctggtaaaagacttgaattcaggcctcattggagccctactagtatgtagagaagggagtctggccaaggaaaagacacagaccttgcacaaatttatactactttttgctgtatttgatgaagggaaaagttggcactcagaaacaaagaactccttgatgcaggatagggatgctgcatctgctcgggcctggcctaaaatgcacacagtcaatggttatgtaaacaggtctctgccaggtctgattggatgccacaggaaatcagtctattggcatgtgattggaatgggcaccactcctgaagtgcactcaatattcctcgaaggtcacacatttcttgtgaggaaccatcgccaggctagcttggaaatctcgccaataactttccttactgctcaaacactcttgatggaccttggacagtttctactgttttgtcatatctcttcccaccaacatgatggcatggaagcttatgtcaaagtagacagctgtccagaggaaccccaactacgaatgaaaaataatgaagaagcggaagactatgatgatgatcttactgattctgaaatggatgtggtcaggtttgatgatgacaactctccttcctttatccaaattcgctcagttgccaagaagcatcctaaaacttgggtacattacattgctgctgaagaggaggactgggactatgctcccttagtcctcgcccccgatgacagaagttataaaagtcaatatttgaacaatggccctcagcggattggtaggaagtacaaaaaagtccgatttatggcatacacagatgaaacctttaagactcgtgaagctattcagcatgaatcaggaatcttgggacctttactttatggggaagttggagacacactgttgattatatttaagaatcaagcaagcagaccatataacatctaccctcacggaatcactgatgtccgtcctttgtattcaaggagattaccaaaaggtgtaaaacatttgaaggattttccaattctgccaggagaaatattcaaatataaatggacagtgactgtagaagatgggccaactaaatcagatcctcggtgcctgacccgctattactctagtttcgttaatatggagagagatctagcttcaggactcattggccctctcctcatctgctacaaagaatctgtagatcaaagaggaaaccagataatgtcagacaagaggaatgtcatcctgttttctgtatttgatgagaaccgaagctggtacctcacagagaatatacaacgctttctccccaatccagctggagtgcagcttgaggatccagagttccaagcctccaacatcatgcacagcatcaatggctatgtttttgatagtttgcagttgtcagtttgtttgcatgaggtggcatactggtacattctaagcattggagcacagactgacttcctttctgtcttcttctctggatataccttcaaacacaaaatggtctatgaagacacactcaccctattcccattctcaggagaaactgtcttcatgtcgatggaaaacccaggtctatggattctggggtgccacaactcagactttcggaacagaggcatgaccgccttactgaaggtttctagttgtgacaagaacactggtgattattacgaggacagttatgaagatatttcagcatacttgctgagtaaaaacaatgccattgaaccaagaagcttctctggcgcgccaggttctcctgctggctcccccacctcaacagaagaggggacaagcgaaagcgctacgcctgagagtggccctggctctgagccagccacctccggctctgaaacccctgcctcgagccaaaacccaccagtcttgaaacgccatcaagctgaaataactcgtactactcttcagtcagatcaagaggaaatcgattatgatgataccatatcagttgaaatgaagaaggaagattttgacatttatgatgaggatgaaaatcagagcccccgcagctttcaaaagaaaacacgacactattttattgctgcagtggagaggctctgggattatgggatgagtagctccccacatgttctaagaaacagggctcagagtggcagtgtccctcagttcaagaaagttgttttccaggaatttactgatggctcctttactcagcccttataccgtggagaactaaatgaacatttgggactcctggggccatatataagagcagaagttgaagataatatcatggtaactttcagaaatcaggcctctcgtccctattccttctattctagccttatttcttatgaggaagatcagaggcaaggagcagaacctagaaaaaactttgtcaagcctaatgaaaccaaaacttacttttggaaagtgcaacatcatatggcacccactaaagatgagtttgactgcaaagcctgggcttatttctctgatgttgacctggaaaaagatgtgcactcaggcctgattggaccccttctggtctgccacactaacacactgaaccctgctcatgggagacaagtgacagtacaggaatttgctctgtttttcaccatctttgatgagaccaaaagctggtacttcactgaaaatatggaaagaaactgcagggctccctgcaatatccagatggaagatcccacttttaaagagaattatcgcttccatgcaatcaatggctacataatggatacactacctggcttagtaatggctcaggatcaaaggattcgatggtatctgctcagcatgggcagcaatgaaaacatccattctattcatttcagtggacatgtgttcactgtacgaaaaaaagaggagtataaaatggcactgtacaatctctatccaggtgtttttgagacagtggaaatgttaccatccaaagctggaatttggcgggtggaatgccttattggcgagcatctacatgctgggatgagcacactttttctggtgtacagcaataagtgtcagactcccctgggaatggcttctggacacattagagattttcagattacagcttcaggacaatatggacagtgggccccaaagctggccagacttcattattccggatcaatcaatgcctggagcaccaaggagcccttttcttggatcaaggtggatctgttggcaccaatgattattcacggcatcaagacccagggtgcccgtcagaagttctccagcctctacatctctcagtttatcatcatgtatagtcttgatgggaagaagtggcagacttatcgaggaaattccactggaaccttaatggtcttctttggcaatgtggattcatctgggataaaacacaatatttttaaccctccaattattgctcgatacatccgtttgcacccaactcattatagcattcgcagcactcttcgcatggagttgatgggctgtgatttaaatagttgcagcatgccattgggaatggagagtaaagcaatatcagatgcacagattactgcttcatcctactttaccaatatgtttgccacctggtctccttcaaaagctcgacttcacctccaagggaggagtaatgcctggagacctcaggtgaataatccaaaagagtggctgcaagtggacttccagaagacaatgaaagtcacaggagtaactactcagggagtaaaatctctgcttaccagcatgtatgtgaaggagttcctcatctccagcagtcaagatggccatcagtggactctcttttttcagaatggcaaagtaaaggtttttcagggaaatcaagactccttcacacctgtggtgaactctctagacccaccgttactgactcgctaccttcgaattcacccccagagttgggtgcaccagattgccctgaggatggaggttctgggctgcgaggcacaggacctctacggcgccggatcacctggggccgaaacggccgaacaaaaactcatctcagaagaggatctgtcacctgcaaccggttga

SEQ ID NO: 744 - protein, 1776 aa, Artificial Sequence
  Description of Artificial Sequence: Synthetic polypeptide
MQIELSTCFFLCLLRFCFSATRRYYLGAVELSWDYMQSDLGELPVDARFPPRVPKSFPFNTSVVYKKTLFVEFTDHLFNIAKPRPPWMGLLGPTIQAEVYDTVVITLKNMASHPVSLHAVGVSYWKASEGAEYDDQTSQREKEDDKVFPGGSHTYVWQVLKENGPMASDPLCLTYSYLSHVDLVKDLNSGLIGALLVCREGSLAKEKTQTLHKFILLFAVFDEGKSWHSETKNSLMQDRDAASARAWPKMHTVNGYVNRSLPGLIGCHRKSVYWHVIGMGTTPEVHSIFLEGHTFLVRNHRQASLEISPITFLTAQTLLMDLGQFLLFCHISSHQHDGMEAYVKVDSCPEEPQLRMKNNEEAEDYDDDLTDSEMDVVRFDDDNSPSFIQIRSVAKKHPKTWVHYIAAEEEDWDYAPLVLAPDDRSYKSQYLNNGPQRIGRKYKKVRFMAYTDETFKTREAIQHESGILGPLLYGEVGDTLLIIFKNQASRPYNIYPHGITDVRPLYSRRLPKGVKHLKDFPILPGEIFKYKWTVTVEDGPTKSDPRCLTRYYSSFVNMERDLASGLIGPLLICYKESVDQRGNQIMSDKRNVILFSVFDENRSWYLTENIQRFLPNPAGVQLEDPEFQASNIMHSINGYVFDSLQLSVCLHEVAYWYILSIGAQTDFLSVFFSGYTFKHKMVYEDTLTLFPFSGETVFMSMENPGLWILGCHNSDFRNRGMTALLKVSSCDKNTGDYYEDSYEDISAYLLSKNNAIEPRSFSQNGAPGTSESATPESGPGSEPATSGSETPGTSESATPESGPGSEPATSGSETPGTSESATPESGPGTSTEPSEGSAPGSPAGSPTSTEEGTSESATPESGPGSEPATSGSETPGTSESATPESGPGSPAGSPTSTEEGSPAGSPTSTEEGTSTEPSEGSAPGTSESATPESGPGTSESATPESGPGTSESATPESGPGSEPATSGSETPGSEPATSGSETPGSPAGSPTSTEEGTSTEPSEGSAPGTSTEPSEGSAPGSEPATSGSETPGTSESATPESGPGTSTEPSEGSAPASSPPVLKRHQREITRTTLQSDQEEIDYDDTISVEMKKEDFDIYDEDENQSPRSFQKKTRHYFIAAVERLWDYGMSSSPHVLRNRAQSGSVPQFKKVVFQEFTDGSFTQPLYRGELNEHLGLLGPYIRAEVEDNIMVTFRNQASRPYSFYSSLISYEEDQRQGAEPRKNFVKPNETKTYFWKVQHHMAPTKDEFDCKAWAYFSDVDLEKDVHSGLIGPLLVCHTNTLNPAHGRQVTVQEFALFFTIFDETKSWYFTENMERNCRAPCNIQMEDPTFKENYRFHAINGYIMDTLPGLVMAQDQRIRWYLLSMGSNENIHSIHFSGHVFTVRKKEEYKMALYNLYPGVFETVEMLPSKAGIWRVECLIGEHLHAGMSTLFLVYSNKCQTPLGMASGHIRDFQITASGQYGQWAPKLARLHYSGSINAWSTKEPFSWIKVDLLAPMIIHGIKTQGARQKFSSLYISQFIIMYSLDGKKWQTYRGNSTGTLMVFFGNVDSSGIKHNIFNPPIIARYIRLHPTHYSIRSTLRMELMGCDLNSCSMPLGMESKAISDAQITASSYFTNMFATWSPSKARLHLQGRSNAWRPQVNNPKEWLQVDFQKTMKVTGVTTQGVKSLLTSMYVKEFLISSSQDGHQWTLFFQNGKVKVFQGNQDSFTPVVNSLDPPLLTRYLRIHPQSWVHQIALRMEVLGCEAQDLYGAGSPGAETAEQKLISEEDLSPATG

SEQ ID NO: 745 - DNA, 5331 bp, Artificial Sequence
  Description of Artificial Sequence: Synthetic polynucleotide
atgcaaatagagctctccacctgcttctttctgtgccttttgcgattctgctttagtgccaccagaagatactacctgggtgcagtggaactgtcatgggactatatgcaaagtgatctcggtgagctgcctgtggacgcaagatttcctcctagagtgccaaaatcttttccattcaacacctcagtcgtgtacaaaaagactctgtttgtagaattcacggatcaccttttcaacatcgctaagccaaggccaccctggatgggtctgctaggtcctaccatccaggctgaggtttatgatacagtggtcattacacttaagaacatggcttcccatcctgtcagtcttcatgctgttggtgtatcctactggaaagcttctgagggagctgaatatgatgatcagaccagtcaaagggagaaagaagatgataaagtcttccctggtggaagccatacatatgtctggcaggtcctgaaagagaatggtccaatggcctctgacccactgtgccttacctactcatatctttctcatgtggacctggtaaaagacttgaattcaggcctcattggagccctactagtatgtagagaagggagtctggccaaggaaaagacacagaccttgcacaaatttatactactttttgctgtatttgatgaagggaaaagttggcactcagaaacaaagaactccttgatgcaggatagggatgctgcatctgctcgggcctggcctaaaatgcacacagtcaatggttatgtaaacaggtctctgccaggtctgattggatgccacaggaaatcagtctattggcatgtgattggaatgggcaccactcctgaagtgcactcaatattcctcgaaggtcacacatttcttgtgaggaaccatcgccaggctagcttggaaatctcgccaataactttccttactgctcaaacactcttgatggaccttggacagtttctactgttttgtcatatctcttcccaccaacatgatggcatggaagcttatgtcaaagtagacagctgtccagaggaaccccaactacgaatgaaaaataatgaagaagcggaagactatgatgatgatcttactgattctgaaatggatgtggtcaggtttgatgatgacaactctccttcctttatccaaattcgctcagttgccaagaagcatcctaaaacttgggtacattacattgctgctgaagaggaggactgggactatgctcccttagtcctcgcccccgatgacagaagttataaaagtcaatatttgaacaatggccctcagcggattggtaggaagtacaaaaaagtccgatttatggcatacacagatgaaacctttaagactcgtgaagctattcagcatgaatcaggaatcttgggacctttactttatggggaagttggagacacactgttgattatatttaagaatcaagcaagcagaccatataacatctaccctcacggaatcactgatgtccgtcctttgtattcaaggagattaccaaaaggtgtaaaacatttgaaggattttccaattctgccaggagaaatattcaaatataaatggacagtgactgtagaagatgggccaactaaatcagatcctcggtgcctgacccgctattactctagtttcgttaatatggagagagatctagcttcaggactcattggccctctcctcatctgctacaaagaatctgtagatcaaagaggaaaccagataatgtcagacaagaggaatgtcatcctgttttctgtatttgatgagaaccgaagctggtacctcacagagaatatacaacgctttctccccaatccagctggagtgcagcttgaggatccagagttccaagcctccaacatcatgcacagcatcaatggctatgtttttgatagtttgcagttgtcagtttgtttgcatgaggtggcatactggtacattctaagcattggagcacagactgacttcctttctgtcttcttctctggatataccttcaaacacaaaatggtctatgaagacacactcaccctattcccattctcaggagaaactgtcttcatgtcgatggaaaacccaggtctatggattctggggtgccacaactcagactttcggaacagaggcatgaccgccttactgaaggtttctagttgtgacaagaacactggtgattattacgaggacagttatgaagatatttcagcatacttgctgagtaaaaacaatgccattgaaccaagaagcttctctcaaaacggcgcgccaggtacctcagagtctgctacccccgagtcagggccaggatcagagccagccacctccgggtctgagacacccgggacttccgagagtgccacccctgagtccggacccgggtccgagcccgccacttccggctccgaaactcccggcacaagcgagagcgctaccccagagtcaggaccaggaacatctacagagccctctgaaggctccgctccagggtccccagccggcagtcccactagcaccgaggagggaacctctgaaagcgccacacccgaatcagggccagggtctgagcctgctaccagcggcagcgagacaccaggcacctctgagtccgccacaccagagtccggacccggatctcccgctgggagccccacctccactgaggagggatctcctgctggctctccaacatctactgaggaaggtacctcaaccgagccatccgagggatcagctcccggcacctcagagtcggcaaccccggagtctggacccggaacttccgaaagtgccacaccagagtccggtcccgggacttcagaatcagcaacacccgagtccggccctgggtctgaacccgccacaagtggtagtgagacaccaggatcagaacctgctacctcagggtcagagacacccggatctccggcaggctcaccaacctccactgaggagggcaccagcacagaaccaagcgagggctccgcacccggaacaagcactgaacccagtgagggttcagcacccggctctgagccggccacaagtggcagtgagacacccggcacttcagagagtgccacccccgagagtggcccaggcactagtaccgagccctctgaaggcagtgcgccagcctcgagcccaccagtcttgaaacgccatcaacgggaaataactcgtactactcttcagtcagatcaagaggaaatcgattatgatgataccatatcagttgaaatgaagaaggaagattttgacatttatgatgaggatgaaaatcagagcccccgcagctttcaaaagaaaacacgacactattttattgctgcagtggagaggctctgggattatgggatgagtagctccccacatgttctaagaaacagggctcagagtggcagtgtccctcagttcaagaaagttgttttccaggaatttactgatggctcctttactcagcccttataccgtggagaactaaatgaacatttgggactcctggggccatatataagagcagaagttgaagataatatcatggtaactttcagaaatcaggcctctcgtccctattccttctattctagccttatttcttatgaggaagatcagaggcaaggagcagaacctagaaaaaactttgtcaagcctaatgaaaccaaaacttacttttggaaagtgcaacatcatatggcacccactaaagatgagtttgactgcaaagcctgggcttatttctctgatgttgacctggaaaaagatgtgcactcaggcctgattggaccccttctggtctgccacactaacacactgaaccctgctcatgggagacaagtgacagtacaggaatttgctctgtttttcaccatctttgatgagaccaaaagctggtacttcactgaaaatatggaaagaaactgcagggctccctgcaatatccagatggaagatcccacttttaaagagaattatcgcttccatgcaatcaatggctacataatggatacactacctggcttagtaatggctcaggatcaaaggattcgatggtatctgctcagcatgggcagcaatgaaaacatccattctattcatttcagtggacatgtgttcactgtacgaaaaaaagaggagtataaaatggcactgtacaatctctatccaggtgtttttgagacagtggaaatgttaccatccaaagctggaatttggcgggtggaatgccttattggcgagcatctacatgctgggatgagcacactttttctggtgtacagcaataagtgtcagactcccctgggaatggcttctggacacattagagattttcagattacagcttcaggacaatatggacagtgggccccaaagctggccagacttcattattccggatcaatcaatgcctggagcaccaaggagcccttttcttggatcaaggtggatctgttggcaccaatgattattcacggcatcaagacccagggtgcccgtcagaagttctccagcctctacatctctcagtttatcatcatgtatagtcttgatgggaagaagtggcagacttatcgaggaaattccactggaaccttaatggtcttctttggcaatgtggattcatctgggataaaacacaatatttttaaccctccaattattgctcgatacatccgtttgcacccaactcattatagcattcgcagcactcttcgcatggagttgatgggctgtgatttaaatagttgcagcatgccattgggaatggagagtaaagcaatatcagatgcacagattactgcttcatcctactttaccaatatgtttgccacctggtctccttcaaaagctcgacttcacctccaagggaggagtaatgcctggagacctcaggtgaataatccaaaagagtggctgcaagtggacttccagaagacaatgaaagtcacaggagtaactactcagggagtaaaatctctgcttaccagcatgtatgtgaaggagttcctcatctccagcagtcaagatggccatcagtggactctcttttttcagaatggcaaagtaaaggtttttcagggaaatcaagactccttcacacctgtggtgaactctctagacccaccgttactgactcgctaccttcgaattcacccccagagttgggtgcaccagattgccctgaggatggaggttctgggctgcgaggcacaggacctctacggcgccggatcacctggggccgaaacggccgaacaaaaactcatctcagaagaggatctgtcacctgcaaccggttga

SEQ ID NO: 746 - protein, 1776 aa, Artificial Sequence
  Description of Artificial Sequence: Synthetic polypeptide
MQIELSTCFFLCLLRFCFSATRRYYLGAVELSWDYMQSDLGELPVDARFPPRVPKSFPFNTSVVYKKTLFVEFTDHLFNIAKPRPPWMGLLGPTIQAEVYDTVVITLKNMASHPVSLHAVGVSYWKASEGAEYDDQTSQREKEDDKVFPGGSHTYVWQVLKENGPMASDPLCLTYSYLSHVDLVKDLNSGLIGALLVCREGSLAKEKTQTLHKFILLFAVFDEGKSWHSETKNSLMQDRDAASARAWPKMHTVNGYVNRSLPGLIGCHRKSVYWHVIGMGTTPEVHSIFLEGHTFLVRNHRQASLEISPITFLTAQTLLMDLGQFLLFCHISSHQHDGMEAYVKVDSCPEEPQLRMKNNEEAEDYDDDLTDSEMDVVRFDDDNSPSFIQIRSVAKKHPKTWVHYIAAEEEDWDYAPLVLAPDDRSYKSQYLNNGPQRIGRKYKKVRFMAYTDETFKTREAIQHESGILGPLLYGEVGDTLLIIFKNQASRPYNIYPHGITDVRPLYSRRLPKGVKHLKDFPILPGEIFKYKWTVTVEDGPTKSDPRCLTRYYSSFVNMERDLASGLIGPLLICYKESVDQRGNQIMSDKRNVILFSVFDENRSWYLTENIQRFLPNPAGVQLEDPEFQASNIMHSINGYVFDSLQLSVCLHEVAYWYILSIGAQTDFLSVFFSGYTFKHKMVYEDTLTLFPFSGETVFMSMENPGLWILGCHNSDFRNRGMTALLKVSSCDKNTGDYYEDSYEDISAYLLSKNNAIEPRSFSGAPGTSESATPESGPGSEPATSGSETPGTSESATPESGPGSEPATSGSETPGTSESATPESGPGTSTEPSEGSAPGSPAGSPTSTEEGTSESATPESGPGSEPATSGSETPGTSESATPESGPGSPAGSPTSTEEGSPAGSPTSTEEGTSTEPSEGSAPGTSESATPESGPGTSESATPESGPGTSESATPESGPGSEPATSGSETPGSEPATSGSETPGSPAGSPTSTEEGTSTEPSEGSAPGTSTEPSEGSAPGSEPATSGSETPGTSESATPESGPGTSTEPSEGSAPASSQNPPVLKRHQREITRTTLQSDQEEIDYDDTISVEMKKEDFDIYDEDENQSPRSFQKKTRHYFIAAVERLWDYGMSSSPHVLRNRAQSGSVPQFKKVVFQEFTDGSFTQPLYRGELNEHLGLLGPYIRAEVEDNIMVTFRNQASRPYSFYSSLISYEEDQRQGAEPRKNFVKPNETKTYFWKVQHHMAPTKDEFDCKAWAYFSDVDLEKDVHSGLIGPLLVCHTNTLNPAHGRQVTVQEFALFFTIFDETKSWYFTENMERNCRAPCNIQMEDPTFKENYRFHAINGYIMDTLPGLVMAQDQRIRWYLLSMGSNENIHSIHFSGHVFTVRKKEEYKMALYNLYPGVFETVEMLPSKAGIWRVECLIGEHLHAGMSTLFLVYSNKCQTPLGMASGHIRDFQITASGQYGQWAPKLARLHYSGSINAWSTKEPFSWIKVDLLAPMIIHGIKTQGARQKFSSLYISQFIIMYSLDGKKWQTYRGNSTGTLMVFFGNVDSSGIKHNIFNPPIIARYIRLHPTHYSIRSTLRMELMGCDLNSCSMPLGMESKAISDAQITASSYFTNMFATWSPSKARLHLQGRSNAWRPQVNNPKEWLQVDFQKTMKVTGVTTQGVKSLLTSMYVKEFLISSSQDGHQWTLFFQNGKVKVFQGNQDSFTPVVNSLDPPLLTRYLRIHPQSWVHQIALRMEVLGCEAQDLYGAGSPGAETAEQKLISEEDLSPATG

SEQ ID NO: 747 - DNA, 5331 bp, Artificial Sequence
  Description of Artificial Sequence: Synthetic polynucleotide
atgcaaatagagctctccacctgcttctttctgtgccttttgcgattctgctttagtgccaccagaagatactacctgggtgcagtggaactgtcatgggactatatgcaaagtgatctcggtgagctgcctgtggacgcaagatttcctcctagagtgccaaaatcttttccattcaacacctcagtcgtgtacaaaaagactctgtttgtagaattcacggatcaccttttcaacatcgctaagccaaggccaccctggatgggtctgctaggtcctaccatccaggctgaggtttatgatacagtggtcattacacttaagaacatggcttcccatcctgtcagtcttcatgctgttggtgtatcctactggaaagcttctgagggagctgaatatgatgatcagaccagtcaaagggagaaagaagatgataaagtcttccctggtggaagccatacatatgtctggcaggtcctgaaagagaatggtccaatggcctctgacccactgtgccttacctactcatatctttctcatgtggacctggtaaaagacttgaattcaggcctcattggagccctactagtatgtagagaagggagtctggccaaggaaaagacacagaccttgcacaaatttatactactttttgctgtatttgatgaagggaaaagttggcactcagaaacaaagaactccttgatgcaggatagggatgctgcatctgctcgggcctggcctaaaatgcacacagtcaatggttatgtaaacaggtctctgccaggtctgattggatgccacaggaaatcagtctattggcatgtgattggaatgggcaccactcctgaagtgcactcaatattcctcgaaggtcacacatttcttgtgaggaaccatcgccaggctagcttggaaatctcgccaataactttccttactgctcaaacactcttgatggaccttggacagtttctactgttttgtcatatctcttcccaccaacatgatggcatggaagcttatgtcaaagtagacagctgtccagaggaaccccaactacgaatgaaaaataatgaagaagcggaagactatgatgatgatcttactgattctgaaatggatgtggtcaggtttgatgatgacaactctccttcctttatccaaattcgctcagttgccaagaagcatcctaaaacttgggtacattacattgctgctgaagaggaggactgggactatgctcccttagtcctcgcccccgatgacagaagttataaaagtcaatatttgaacaatggccctcagcggattggtaggaagtacaaaaaagtccgatttatggcatacacagatgaaacctttaagactcgtgaagctattcagcatgaatcaggaatcttgggacctttactttatggggaagttggagacacactgttgattatatttaagaatcaagcaagcagaccatataacatctaccctcacggaatcactgatgtccgtcctttgtattcaaggagattaccaaaaggtgtaaaacatttgaaggattttccaattctgccaggagaaatattcaaatataaatggacagtgactgtagaagatgggccaactaaatcagatcctcggtgcctgacccgctattactctagtttcgttaatatggagagagatctagcttcaggactcattggccctctcctcatctgctacaaagaatctgtagatcaaagaggaaaccagataatgtcagacaagaggaatgtcatcctgttttctgtatttgatgagaaccgaagctggtacctcacagagaatatacaacgctttctccccaatccagctggagtgcagcttgaggatccagagttccaagcctccaacatcatgcacagcatcaatggctatgtttttgatagtttgcagttgtcagtttgtttgcatgaggtggcatactggtacattctaagcattggagcacagactgacttcctttctgtcttcttctctggatataccttcaaacacaaaatggtctatgaagacacactcaccctattcccattctcaggagaaactgtcttcatgtcgatggaaaacccaggtctatggattctggggtgccacaactcagactttcggaacagaggcatgaccgccttactgaaggtttctagttgtgacaagaacactggtgattattacgaggacagttatgaagatatttcagcatacttgctgagtaaaaacaatgccattgaaccaagaagcttctctggcgcgccaggtacctcagagtctgctacccccgagtcagggccaggatcagagccagccacctccgggtctgagacacccgggacttccgagagtgccacccctgagtccggacccgggtccgagcccgccacttccggctccgaaactcccggcacaagcgagagcgctaccccagagtcaggaccaggaacatctacagagccctctgaaggctccgctccagggtccccagccggcagtcccactagcaccgaggagggaacctctgaaagcgccacacccgaatcagggccagggtctgagcctgctaccagcggcagcgagacaccaggcacctctgagtccgccacaccagagtccggacccggatctcccgctgggagccccacctccactgaggagggatctcctgctggctctccaacatctactgaggaaggtacctcaaccgagccatccgagggatcagctcccggcacctcagagtcggcaaccccggagtctggacccggaacttccgaaagtgccacaccagagtccggtcccgggacttcagaatcagcaacacccgagtccggccctgggtctgaacccgccacaagtggtagtgagacaccaggatcagaacctgctacctcagggtcagagacacccggatctccggcaggctcaccaacctccactgaggagggcaccagcacagaaccaagcgagggctccgcacccggaacaagcactgaacccagtgagggttcagcacccggctctgagccggccacaagtggcagtgagacacccggcacttcagagagtgccacccccgagagtggcccaggcactagtaccgagccctctgaaggcagtgcgccagcctcgagccaaaacccaccagtcttgaaacgccatcaacgggaaataactcgtactactcttcagtcagatcaagaggaaatcgattatgatgataccatatcagttgaaatgaagaaggaagattttgacatttatgatgaggatgaaaatcagagcccccgcagctttcaaaagaaaacacgacactattttattgctgcagtggagaggctctgggattatgggatgagtagctccccacatgttctaagaaacagggctcagagtggcagtgtccctcagttcaagaaagttgttttccaggaatttactgatggctcctttactcagcccttataccgtggagaactaaatgaacatttgggactcctggggccatatataagagcagaagttgaagataatatcatggtaactttcagaaatcaggcctctcgtccctattccttctattctagccttatttcttatgaggaagatcagaggcaaggagcagaacctagaaaaaactttgtcaagcctaatgaaaccaaaacttacttttggaaagtgcaacatcatatggcacccactaaagatgagtttgactgcaaagcctgggcttatttctctgatgttgacctggaaaaagatgtgcactcaggcctgattggaccccttctggtctgccacactaacacactgaaccctgctcatgggagacaagtgacagtacaggaatttgctctgtttttcaccatctttgatgagaccaaaagctggtacttcactgaaaatatggaaagaaactgcagggctccctgcaatatccagatggaagatcccacttttaaagagaattatcgcttccatgcaatcaatggctacataatggatacactacctggcttagtaatggctcaggatcaaaggattcgatggtatctgctcagcatgggcagcaatgaaaacatccattctattcatttcagtggacatgtgttcactgtacgaaaaaaagaggagtataaaatggcactgtacaatctctatccaggtgtttttgagacagtggaaatgttaccatccaaagctggaatttggcgggtggaatgccttattggcgagcatctacatgctgggatgagcacactttttctggtgtacagcaataagtgtcagactcccctgggaatggcttctggacacattagagattttcagattacagcttcaggacaatatggacagtgggccccaaagctggccagacttcattattccggatcaatcaatgcctggagcaccaaggagcccttttcttggatcaaggtggatctgttggcaccaatgattattcacggcatcaagacccagggtgcccgtcagaagttctccagcctctacatctctcagtttatcatcatgtatagtcttgatgggaagaagtggcagacttatcgaggaaattccactggaaccttaatggtcttctttggcaatgtggattcatctgggataaaacacaatatttttaaccctccaattattgctcgatacatccgtttgcacccaactcattatagcattcgcagcactcttcgcatggagttgatgggctgtgatttaaatagttgcagcatgccattgggaatggagagtaaagcaatatcagatgcacagattactgcttcatcctactttaccaatatgtttgccacctggtctccttcaaaagctcgacttcacctccaagggaggagtaatgcctggagacctcaggtgaataatccaaaagagtggctgcaagtggacttccagaagacaatgaaagtcacaggagtaactactcagggagtaaaatctctgcttaccagcatgtatgtgaaggagttcctcatctccagcagtcaagatggccatcagtggactctcttttttcagaatggcaaagtaaaggtttttcagggaaatcaagactccttcacacctgtggtgaactctctagacccaccgttactgactcgctaccttcgaattcacccccagagttgggtgcaccagattgccctgaggatggaggttctgggctgcgaggcacaggacctctacggcgccggatcacctggggccgaaacggccgaacaaaaactcatctcagaagaggatctgtcacctgcaaccggttga

SEQ ID NO: 748 - protein, 1776 aa, Artificial Sequence
  Description of Artificial Sequence: Synthetic polypeptide
MQIELSTCFFLCLLRFCFSATRRYYLGAVELSWDYMQSDLGELPVDARFPPRVPKSFPFNTSVVYKKTLFVEFTDHLFNIAKPRPPWMGLLGPTIQAEVYDTVVITLKNMASHPVSLHAVGVSYWKASEGAEYDDQTSQREKEDDKVFPGGSHTYVWQVLKENGPMASDPLCLTYSYLSHVDLVKDLNSGLIGALLVCREGSLAKEKTQTLHKFILLFAVFDEGKSWHSETKNSLMQDRDAASARAWPKMHTVNGYVNRSLPGLIGCHRKSVYWHVIGMGTTPEVHSIFLEGHTFLVRNHRQASLEISPITFLTAQTLLMDLGQFLLFCHISSHQHDGMEAYVKVDSCPEEPQLRMKNNEEAEDYDDDLTDSEMDVVRFDDDNSPSFIQIRSVAKKHPKTWVHYIAAEEEDWDYAPLVLAPDDRSYKSQYLNNGPQRIGRKYKKVRFMAYTDETFKTREAIQHESGILGPLLYGEVGDTLLIIFKNQASRPYNIYPHGITDVRPLYSRRLPKGVKHLKDFPILPGEIFKYKWTVTVEDGPTKSDPRCLTRYYSSFVNMERDLASGLIGPLLICYKESVDQRGNQIMSDKRNVILFSVFDENRSWYLTENIQRFLPNPAGVQLEDPEFQASNIMHSINGYVFDSLQLSVCLHEVAYWYILSIGAQTDFLSVFFSGYTFKHKMVYEDTLTLFPFSGETVFMSMENPGLWILGCHNSDFRNRGMTALLKVSSCDKNTGDYYEDSYEDISAYLLSKNNAIEPRSFSQNGAPGTSESATPESGPGSEPATSGSETPGTSESATPESGPGSEPATSGSETPGTSESATPESGPGTSTEPSEGSAPGSPAGSPTSTEEGTSESATPESGPGSEPATSGSETPGTSESATPESGPGSPAGSPTSTEEGSPAGSPTSTEEGTSTEPSEGSAPGTSESATPESGPGTSESATPESGPGTSESATPESGPGSEPATSGSETPGSEPATSGSETPGSPAGSPTSTEEGTSTEPSEGSAPGTSTEPSEGSAPGSEPATSGSETPGTSESATPESGPGTSTEPSEGSAPASSPPVLKRHQAEITRTTLQSDQEEIDYDDTISVEMKKEDFDIYDEDENQSPRSFQKKTRHYFIAAVERLWDYGMSSSPHVLRNRAQSGSVPQFKKVVFQEFTDGSFTQPLYRGELNEHLGLLGPYIRAEVEDNIMVTFRNQASRPYSFYSSLISYEEDQRQGAEPRKNFVKPNETKTYFWKVQHHMAPTKDEFDCKAWAYFSDVDLEKDVHSGLIGPLLVCHTNTLNPAHGRQVTVQEFALFFTIFDETKSWYFTENMERNCRAPCNIQMEDPTFKENYRFHAINGYIMDTLPGLVMAQDQRIRWYLLSMGSNENIHSIHFSGHVFTVRKKEEYKMALYNLYPGVFETVEMLPSKAGIWRVECLIGEHLHAGMSTLFLVYSNKCQTPLGMASGHIRDFQITASGQYGQWAPKLARLHYSGSINAWSTKEPFSWIKVDLLAPMIIHGIKTQGARQKFSSLYISQFIIMYSLDGKKWQTYRGNSTGTLMVFFGNVDSSGIKHNIFNPPIIARYIRLHPTHYSIRSTLRMELMGCDLNSCSMPLGMESKAISDAQITASSYFTNMFATWSPSKARLHLQGRSNAWRPQVNNPKEWLQVDFQKTMKVTGVTTQGVKSLLTSMYVKEFLISSSQDGHQWTLFFQNGKVKVFQGNQDSFTPVVNSLDPPLLTRYLRIHPQSWVHQIALRMEVLGCEAQDLYGAGSPGAETAEQKLISEEDLSPATG

SEQ ID NO: 749 - DNA, 5331 bp, Artificial Sequence
  Description of Artificial Sequence: Synthetic polynucleotide
atgcaaatagagctctccacctgcttctttctgtgccttttgcgattctgctttagtgccaccagaagatactacctgggtgcagtggaactgtcatgggactatatgcaaagtgatctcggtgagctgcctgtggacgcaagatttcctcctagagtgccaaaatcttttccattcaacacctcagtcgtgtacaaaaagactctgtttgtagaattcacggatcaccttttcaacatcgctaagccaaggccaccctggatgggtctgctaggtcctaccatccaggctgaggtttatgatacagtggtcattacacttaagaacatggcttcccatcctgtcagtcttcatgctgttggtgtatcctactggaaagcttctgagggagctgaatatgatgatcagaccagtcaaagggagaaagaagatgataaagtcttccctggtggaagccatacatatgtctggcaggtcctgaaagagaatggtccaatggcctctgacccactgtgccttacctactcatatctttctcatgtggacctggtaaaagacttgaattcaggcctcattggagccctactagtatgtagagaagggagtctggccaaggaaaagacacagaccttgcacaaatttatactactttttgctgtatttgatgaagggaaaagttggcactcagaaacaaagaactccttgatgcaggatagggatgctgcatctgctcgggcctggcctaaaatgcacacagtcaatggttatgtaaacaggtctctgccaggtctgattggatgccacaggaaatcagtctattggcatgtgattggaatgggcaccactcctgaagtgcactcaatattcctcgaaggtcacacatttcttgtgaggaaccatcgccaggctagcttggaaatctcgccaataactttccttactgctcaaacactcttgatggaccttggacagtttctactgttttgtcatatctcttcccaccaacatgatggcatggaagcttatgtcaaagtagacagctgtccagaggaaccccaactacgaatgaaaaataatgaagaagcggaagactatgatgatgatcttactgattctgaaatggatgtggtcaggtttgatgatgacaactctccttcctttatccaaattcgctcagttgccaagaagcatcctaaaacttgggtacattacattgctgctgaagaggaggactgggactatgctcccttagtcctcgcccccgatgacagaagttataaaagtcaatatttgaacaatggccctcagcggattggtaggaagtacaaaaaagtccgatttatggcatacacagatgaaacctttaagactcgtgaagctattcagcatgaatcaggaatcttgggacctttactttatggggaagttggagacacactgttgattatatttaagaatcaagcaagcagaccatataacatctaccctcacggaatcactgatgtccgtcctttgtattcaaggagattaccaaaaggtgtaaaacatttgaaggattttccaattctgccaggagaaatattcaaatataaatggacagtgactgtagaagatgggccaactaaatcagatcctcggtgcctgacccgctattactctagtttcgttaatatggagagagatctagcttcaggactcattggccctctcctcatctgctacaaagaatctgtagatcaaagaggaaaccagataatgtcagacaagaggaatgtcatcctgttttctgtatttgatgagaaccgaagctggtacctcacagagaatatacaacgctttctccccaatccagctggagtgcagcttgaggatccagagttccaagcctccaacatcatgcacagcatcaatggctatgtttttgatagtttgcagttgtcagtttgtttgcatgaggtggcatactggtacattctaagcattggagcacagactgacttcctttctgtcttcttctctggatataccttcaaacacaaaatggtctatgaagacacactcaccctattcccattctcaggagaaactgtcttcatgtcgatggaaaacccaggtctatggattctggggtgccacaactcagactttcggaacagaggcatgaccgccttactgaaggtttctagttgtgacaagaacactggtgattattacgaggacagttatgaagatatttcagcatacttgctgagtaaaaacaatgccattgaaccaagaagcttctctcaaaacggcgcgccaggtacctcagagtctgctacccccgagtcagggccaggatcagagccagccacctccgggtctgagacacccgggacttccgagagtgccacccctgagtccggacccgggtccgagcccgccacttccggctccgaaactcccggcacaagcgagagcgctaccccagagtcaggaccaggaacatctacagagccctctgaaggctccgctccagggtccccagccggcagtcccactagcaccgaggagggaacctctgaaagcgccacacccgaatcagggccagggtctgagcctgctaccagcggcagcgagacaccaggcacctctgagtccgccacaccagagtccggacccggatctcccgctgggagccccacctccactgaggagggatctcctgctggctctccaacatctactgaggaaggtacctcaaccgagccatccgagggatcagctcccggcacctcagagtcggcaaccccggagtctggacccggaacttccgaaagtgccacaccagagtccggtcccgggacttcagaatcagcaacacccgagtccggccctgggtctgaacccgccacaagtggtagtgagacaccaggatcagaacctgctacctcagggtcagagacacccggatctccggcaggctcaccaacctccactgaggagggcaccagcacagaaccaagcgagggctccgcacccggaacaagcactgaacccagtgagggttcagcacccggctctgagccggccacaagtggcagtgagacacccggcacttcagagagtgccacccccgagagtggcccaggcactagtaccgagccctctgaaggcagtgcgccagcctcgagcccaccagtcttgaaacgccatcaagctgaaataactcgtactactcttcagtcagatcaagaggaaatcgattatgatgataccatatcagttgaaatgaagaaggaagattttgacatttatgatgaggatgaaaatcagagcccccgcagctttcaaaagaaaacacgacactattttattgctgcagtggagaggctctgggattatgggatgagtagctccccacatgttctaagaaacagggctcagagtggcagtgtccctcagttcaagaaagttgttttccaggaatttactgatggctcctttactcagcccttataccgtggagaactaaatgaacatttgggactcctggggccatatataagagcagaagttgaagataatatcatggtaactttcagaaatcaggcctctcgtccctattccttctattctagccttatttcttatgaggaagatcagaggcaaggagcagaacctagaaaaaactttgtcaagcctaatgaaaccaaaacttacttttggaaagtgcaacatcatatggcacccactaaagatgagtttgactgcaaagcctgggcttatttctctgatgttgacctggaaaaagatgtgcactcaggcctgattggaccccttctggtctgccacactaacacactgaaccctgctcatgggagacaagtgacagtacaggaatttgctctgtttttcaccatctttgatgagaccaaaagctggtacttcactgaaaatatggaaagaaactgcagggctccctgcaatatccagatggaagatcccacttttaaagagaattatcgcttccatgcaatcaatggctacataatggatacactacctggcttagtaatggctcaggatcaaaggattcgatggtatctgctcagcatgggcagcaatgaaaacatccattctattcatttcagtggacatgtgttcactgtacgaaaaaaagaggagtataaaatggcactgtacaatctctatccaggtgtttttgagacagtggaaatgttaccatccaaagctggaatttggcgggtggaatgccttattggcgagcatctacatgctgggatgagcacactttttctggtgtacagcaataagtgtcagactcccctgggaatggcttctggacacattagagattttcagattacagcttcaggacaatatggacagtgggccccaaagctggccagacttcattattccggatcaatcaatgcctggagcaccaaggagcccttttcttggatcaaggtggatctgttggcaccaatgattattcacggcatcaagacccagggtgcccgtcagaagttctccagcctctacatctctcagtttatcatcatgtatagtcttgatgggaagaagtggcagacttatcgaggaaattccactggaaccttaatggtcttctttggcaatgtggattcatctgggataaaacacaatatttttaaccctccaattattgctcgatacatccgtttgcacccaactcattatagcattcgcagcactcttcgcatggagttgatgggctgtgatttaaatagttgcagcatgccattgggaatggagagtaaagcaatatcagatgcacagattactgcttcatcctactttaccaatatgtttgccacctggtctccttcaaaagctcgacttcacctccaagggaggagtaatgcctggagacctcaggtgaataatccaaaagagtggctgcaagtggacttccagaagacaatgaaagtcacaggagtaactactcagggagtaaaatctctgcttaccagcatgtatgtgaaggagttcctcatctccagcagtcaagatggccatcagtggactctcttttttcagaatggcaaagtaaaggtttttcagggaaatcaagactccttcacacctgtggtgaactctctagacccaccgttactgactcgctaccttcgaattcacccccagagttgggtgcaccagattgccctgaggatggaggttctgggctgcgaggcacaggacctctacggcgccggatcacctggggccgaaacggccgaacaaaaactcatctcagaagaggatctgtcacctgcaaccggttga

SEQ ID NO: 750 - protein, 1776 aa, Artificial Sequence
  Description of Artificial Sequence: Synthetic polypeptide
MQIELSTCFFLCLLRFCFSATRRYYLGAVELSWDYMQSDLGELPVDARFPPRVPKSFPFNTSVVYKKTLFVEFTDHLFNIAKPRPPWMGLLGPTIQAEVYDTVVITLKNMASHPVSLHAVGVSYWKASEGAEYDDQTSQREKEDDKVFPGGSHTYVWQVLKENGPMASDPLCLTYSYLSHVDLVKDLNSGLIGALLVCREGSLAKEKTQTLHKFILLFAVFDEGKSWHSETKNSLMQDRDAASARAWPKMHTVNGYVNRSLPGLIGCHRKSVYWHVIGMGTTPEVHSIFLEGHTFLVRNHRQASLEISPITFLTAQTLLMDLGQFLLFCHISSHQHDGMEAYVKVDSCPEEPQLRMKNNEEAEDYDDDLTDSEMDVVRFDDDNSPSFIQIRSVAKKHPKTWVHYIAAEEEDWDYAPLVLAPDDRSYKSQYLNNGPQRIGRKYKKVRFMAYTDETFKTREAIQHESGILGPLLYGEVGDTLLIIFKNQASRPYNIYPHGITDVRPLYSRRLPKGVKHLKDFPILPGEIFKYKWTVTVEDGPTKSDPRCLTRYYSSFVNMERDLASGLIGPLLICYKESVDQRGNQIMSDKRNVILFSVFDENRSWYLTENIQRFLPNPAGVQLEDPEFQASNIMHSINGYVFDSLQLSVCLHEVAYWYILSIGAQTDFLSVFFSGYTFKHKMVYEDTLTLFPFSGETVFMSMENPGLWILGCHNSDFRNRGMTALLKVSSCDKNTGDYYEDSYEDISAYLLSKNNAIEPRSFSGAPGTSESATPESGPGSEPATSGSETPGTSESATPESGPGSEPATSGSETPGTSESATPESGPGTSTEPSEGSAPGSPAGSPTSTEEGTSESATPESGPGSEPATSGSETPGTSESATPESGPGSPAGSPTSTEEGSPAGSPTSTEEGTSTEPSEGSAPGTSESATPESGPGTSESATPESGPGTSESATPESGPGSEPATSGSETPGSEPATSGSETPGSPAGSPTSTEEGTSTEPSEGSAPGTSTEPSEGSAPGSEPATSGSETPGTSESATPESGPGTSTEPSEGSAPASSQNPPVLKRHQAEITRTTLQSDQEEIDYDDTISVEMKKEDFDIYDEDENQSPRSFQKKTRHYFIAAVERLWDYGMSSSPHVLRNRAQSGSVPQFKKVVFQEFTDGSFTQPLYRGELNEHLGLLGPYIRAEVEDNIMVTFRNQASRPYSFYSSLISYEEDQRQGAEPRKNFVKPNETKTYFWKVQHHMAPTKDEFDCKAWAYFSDVDLEKDVHSGLIGPLLVCHTNTLNPAHGRQVTVQEFALFFTIFDETKSWYFTENMERNCRAPCNIQMEDPTFKENYRFHAINGYIMDTLPGLVMAQDQRIRWYLLSMGSNENIHSIHFSGHVFTVRKKEEYKMALYNLYPGVFETVEMLPSKAGIWRVECLIGEHLHAGMSTLFLVYSNKCQTPLGMASGHIRDFQITASGQYGQWAPKLARLHYSGSINAWSTKEPFSWIKVDLLAPMIIHGIKTQGARQKFSSLYISQFIIMYSLDGKKWQTYRGNSTGTLMVFFGNVDSSGIKHNIFNPPIIARYIRLHPTHYSIRSTLRMELMGCDLNSCSMPLGMESKAISDAQITASSYFTNMFATWSPSKARLHLQGRSNAWRPQVNNPKEWLQVDFQKTMKVTGVTTQGVKSLLTSMYVKEFLISSSQDGHQWTLFFQNGKVKVFQGNQDSFTPVVNSLDPPLLTRYLRIHPQSWVHQIALRMEVLGCEAQDLYGAGSPGAETAEQKLISEEDLSPATG

SEQ ID NO: 751 - DNA, 5331 bp, Artificial Sequence
  Description of Artificial Sequence: Synthetic polynucleotide
atgcaaatagagctctccacctgcttctttctgtgccttttgcgattctgctttagtgccaccagaagatactacctgggtgcagtggaactgtcatgggactatatgcaaagtgatctcggtgagctgcctgtggacgcaagatttcctcctagagtgccaaaatcttttccattcaacacctcagtcgtgtacaaaaagactctgtttgtagaattcacggatcaccttttcaacatcgctaagccaaggccaccctggatgggtctgctaggtcctaccatccaggctgaggtttatgatacagtggtcattacacttaagaacatggcttcccatcctgtcagtcttcatgctgttggtgtatcctactggaaagcttctgagggagctgaatatgatgatcagaccagtcaaagggagaaagaagatgataaagtcttccctggtggaagccatacatatgtctggcaggtcctgaaagagaatggtccaatggcctctgacccactgtgccttacctactcatatctttctcatgtggacctggtaaaagacttgaattcaggcctcattggagccctactagtatgtagagaagggagtctggccaaggaaaagacacagaccttgcacaaatttatactactttttgctgtatttgatgaagggaaaagttggcactcagaaacaaagaactccttgatgcaggatagggatgctgcatctgctcgggcctggcctaaaatgcacacagtcaatggttatgtaaacaggtctctgccaggtctgattggatgccacaggaaatcagtctattggcatgtgattggaatgggcaccactcctgaagtgcactcaatattcctcgaaggtcacacatttcttgtgaggaaccatcgccaggctagcttggaaatctcgccaataactttccttactgctcaaacactcttgatggaccttggacagtttctactgttttgtcatatctcttcccaccaacatgatggcatggaagcttatgtcaaagtagacagctgtccagaggaaccccaactacgaatgaaaaataatgaagaagcggaagactatgatgatgatcttactgattctgaaatggatgtggtcaggtttgatgatgacaactctccttcctttatccaaattcgctcagttgccaagaagcatcctaaaacttgggtacattacattgctgctgaagaggaggactgggactatgctcccttagtcctcgcccccgatgacagaagttataaaagtcaatatttgaacaatggccctcagcggattggtaggaagtacaaaaaagtccgatttatggcatacacagatgaaacctttaagactcgtgaagctattcagcatgaatcaggaatcttgggacctttactttatggggaagttggagacacactgttgattatatttaagaatcaagcaagcagaccatataacatctaccctcacggaatcactgatgtccgtcctttgtattcaaggagattaccaaaaggtgtaaaacatttgaaggattttccaattctgccaggagaaatattcaaatataaatggacagtgactgtagaagatgggccaactaaatcagatcctcggtgcctgacccgctattactctagtttcgttaatatggagagagatctagcttcaggactcattggccctctcctcatctgctacaaagaatctgtagatcaaagaggaaaccagataatgtcagacaagaggaatgtcatcctgttttctgtatttgatgagaaccgaagctggtacctcacagagaatatacaacgctttctccccaatccagctggagtgcagcttgaggatccagagttccaagcctccaacatcatgcacagcatcaatggctatgtttttgatagtttgcagttgtcagtttgtttgcatgaggtggcatactggtacattctaagcattggagcacagactgacttcctttctgtcttcttctctggatataccttcaaacacaaaatggtctatgaagacacactcaccctattcccattctcaggagaaactgtcttcatgtcgatggaaaacccaggtctatggattctggggtgccacaactcagactttcggaacagaggcatgaccgccttactgaaggtttctagttgtgacaagaacactggtgattattacgaggacagttatgaagatatttcagcatacttgctgagtaaaaacaatgccattgaaccaagaagcttctctggcgcgccaggtacctcagagtctgctacccccgagtcagggccaggatcagagccagccacctccgggtctgagacacccgggacttccgagagtgccacccctgagtccggacccgggtccgagcccgccacttccggctccgaaactcccggcacaagcgagagcgctaccccagagtcaggaccaggaacatctacagagccctctgaaggctccgctccagggtccccagccggcagtcccactagcaccgaggagggaacctctgaaagcgccacacccgaatcagggccagggtctgagcctgctaccagcggcagcgagacaccaggcacctctgagtccgccacaccagagtccggacccggatctcccgctgggagccccacctccactgaggagggatctcctgctggctctccaacatctactgaggaaggtacctcaaccgagccatccgagggatcagctcccggcacctcagagtcggcaaccccggagtctggacccggaacttccgaaagtgccacaccagagtccggtcccgggacttcagaatcagcaacacccgagtccggccctgggtctgaacccgccacaagtggtagtgagacaccaggatcagaacctgctacctcagggtcagagacacccggatctccggcaggctcaccaacctccactgaggagggcaccagcacagaaccaagcgagggctccgcacccggaacaagcactgaacccagtgagggttcagcacccggctctgagccggccacaagtggcagtgagacacccggcacttcagagagtgccacccccgagagtggcccaggcactagtaccgagccctctgaaggcagtgcgccagcctcgagccaaaacccaccagtcttgaaacgccatcaagctgaaataactcgtactactcttcagtcagatcaagaggaaatcgattatgatgataccatatcagttgaaatgaagaaggaagattttgacatttatgatgaggatgaaaatcagagcccccgcagctttcaaaagaaaacacgacactattttattgctgcagtggagaggctctgggattatgggatgagtagctccccacatgttctaagaaacagggctcagagtggcagtgtccctcagttcaagaaagttgttttccaggaatttactgatggctcctttactcagcccttataccgtggagaactaaatgaacatttgggactcctggggccatatataagagcagaagttgaagataatatcatggtaactttcagaaatcaggcctctcgtccctattccttctattctagccttatttcttatgaggaagatcagaggcaaggagcagaacctagaaaaaactttgtcaagcctaatgaaaccaaaacttacttttggaaagtgcaacatcatatggcacccactaaagatgagtttgactgcaaagcctgggcttatttctctgatgttgacctggaaaaagatgtgcactcaggcctgattggaccccttctggtctgccacactaacacactgaaccctgctcatgggagacaagtgacagtacaggaatttgctctgtttttcaccatctttgatgagaccaaaagctggtacttcactgaaaatatggaaagaaactgcagggctccctgcaatatccagatggaagatcccacttttaaagagaattatcgcttccatgcaatcaatggctacataatggatacactacctggcttagtaatggctcaggatcaaaggattcgatggtatctgctcagcatgggcagcaatgaaaacatccattctattcatttcagtggacatgtgttcactgtacgaaaaaaagaggagtataaaatggcactgtacaatctctatccaggtgtttttgagacagtggaaatgttaccatccaaagctggaatttggcgggtggaatgccttattggcgagcatctacatgctgggatgagcacactttttctggtgtacagcaataagtgtcagactcccctgggaatggcttctggacacattagagattttcagattacagcttcaggacaatatggacagtgggccccaaagctggccagacttcattattccggatcaatcaatgcctggagcaccaaggagcccttttcttggatcaaggtggatctgttggcaccaatgattattcacggcatcaagacccagggtgcccgtcagaagttctccagcctctacatctctcagtttatcatcatgtatagtcttgatgggaagaagtggcagacttatcgaggaaattccactggaaccttaatggtcttctttggcaatgtggattcatctgggataaaacacaatatttttaaccctccaattattgctcgatacatccgtttgcacccaactcattatagcattcgcagcactcttcgcatggagttgatgggctgtgatttaaatagttgcagcatgccattgggaatggagagtaaagcaatatcagatgcacagattactgcttcatcctactttaccaatatgtttgccacctggtctccttcaaaagctcgacttcacctccaagggaggagtaatgcctggagacctcaggtgaataatccaaaagagtggctgcaagtggacttccagaagacaatgaaagtcacaggagtaactactcagggagtaaaatctctgcttaccagcatgtatgtgaaggagttcctcatctccagcagtcaagatggccatcagtggactctcttttttcagaatggcaaagtaaaggtttttcagggaaatcaagactccttcacacctgtggtgaactctctagacccaccgttactgactcgctaccttcgaattcacccccagagttgggtgcaccagattgccctgaggatggaggttctgggctgcgaggcacaggacctctacggcgccggatcacctggggccgaaacggccgaacaaaaactcatctcagaagaggatctgtcacctgcaaccggttga

SEQ ID NO: 752 - protein, 1527 aa, Artificial Sequence
  Description of Artificial Sequence: Synthetic polypeptide
MQIELSTCFFLCLLRFCFSATRRYYLGAVELSWDYMQSDLGELPVDARFPPRVPKSFPFNTSVVYKKTLFVEFTDHLFNIAKPRPPWMGLLGPTIQAEVYDTVVITLKNMASHPVSLHAVGVSYWKASEGAEYDDQTSQREKEDDKVFPGGSHTYVWQVLKENGPMASDPLCLTYSYLSHVDLVKDLNSGLIGALLVCREGSLAKEKTQTLHKFILLFAVFDEGKSWHSETKNSLMQDRDAASARAWPKMHTVNGYVNRSLPGLIGCHRKSVYWHVIGMGTTPEVHSIFLEGHTFLVRNHRQASLEISPITFLTAQTLLMDLGQFLLFCHISSHQHDGMEAYVKVDSCPEEPQLRMKNNEEAEDYDDDLTDSEMDVVRFDDDNSPSFIQIRSVAKKHPKTWVHYIAAEEEDWDYAPLVLAPDDRSYKSQYLNNGPQRIGRKYKKVRFMAYTDETFKTREAIQHESGILGPLLYGEVGDTLLIIFKNQASRPYNIYPHGITDVRPLYSRRLPKGVKHLKDFPILPGEIFKYKWTVTVEDGPTKSDPRCLTRYYSSFVNMERDLASGLIGPLLICYKESVDQRGNQIMSDKRNVILFSVFDENRSWYLTENIQRFLPNPAGVQLEDPEFQASNIMHSINGYVFDSLQLSVCLHEVAYWYILSIGAQTDFLSVFFSGYTFKHKMVYEDTLTLFPFSGETVFMSMENPGLWILGCHNSDFRNRGMTALLKVSSCDKNTGDYYEDSYEDISAYLLSKNNAIEPRSFSQNPPVLKRHQREITRTTLQSDQEEIDYDDTISVEMKKEDFDIYDEDENQSPRSFQKKTRHYFIAAVERLWDYGMSSSPHVLRNRAQGAPGSPAGSPTSTEEGTSESATPESGPGSEPATSGSETPASSRAQSGSVPQFKKVVFQEFTDGSFTQPLYRGELNEHLGLLGPYIRAEVEDNIMVTFRNQASRPYSFYSSLISYEEDQRQGAEPRKNFVKPNETKTYFWKVQHHMAPTKDEFDCKAWAYFSDVDLEKDVHSGLIGPLLVCHTNTLNPAHGRQVTVQEFALFFTIFDETKSWYFTENMERNCRAPCNIQMEDPTFKENYRFHAINGYIMDTLPGLVMAQDQRIRWYLLSMGSNENIHSIHFSGHVFTVRKKEEYKMALYNLYPGVFETVEMLPSKAGIWRVECLIGEHLHAGMSTLFLVYSNKCQTPLGMASGHIRDFQITASGQYGQWAPKLARLHYSGSINAWSTKEPFSWIKVDLLAPMIIHGIKTQGARQKFSSLYISQFIIMYSLDGKKWQTYRGNSTGTLMVFFGNVDSSGIKHNIFNPPIIARYIRLHPTHYSIRSTLRMELMGCDLNSCSMPLGMESKAISDAQITASSYFTNMFATWSPSKARLHLQGRSNAWRPQVNNPKEWLQVDFQKTMKVTGVTTQGVKSLLTSMYVKEFLISSSQDGHQWTLFFQNGKVKVFQGNQDSFTPVVNSLDPPLLTRYLRIHPQSWVHQIALRMEVLGCEAQDLYGAGSPGAETAEQKLISEEDLSPATG

SEQ ID NO: 753 - DNA, 4584 bp, Artificial Sequence
  Description of Artificial Sequence: Synthetic polynucleotide
atgcaaatagagctctccacctgcttctttctgtgccttttgcgattctgctttagtgccaccagaagatactacctgggtgcagtggaactgtcatgggactatatgcaaagtgatctcggtgagctgcctgtggacgcaagatttcctcctagagtgccaaaatcttttccattcaacacctcagtcgtgtacaaaaagactctgtttgtagaattcacggatcaccttttcaacatcgctaagccaaggccaccctggatgggtctgctaggtcctaccatccaggctgaggtttatgatacagtggtcattacacttaagaacatggcttcccatcctgtcagtcttcatgctgttggtgtatcctactggaaagcttctgagggagctgaatatgatgatcagaccagtcaaagggagaaagaagatgataaagtcttccctggtggaagccatacatatgtctggcaggtcctgaaagagaatggtccaatggcctctgacccactgtgccttacctactcatatctttctcatgtggacctggtaaaagacttgaattcaggcctcattggagccctactagtatgtagagaagggagtctggccaaggaaaagacacagaccttgcacaaatttatactactttttgctgtatttgatgaagggaaaagttggcactcagaaacaaagaactccttgatgcaggatagggatgctgcatctgctcgggcctggcctaaaatgcacacagtcaatggttatgtaaacaggtctctgccaggtctgattggatgccacaggaaatcagtctattggcatgtgattggaatgggcaccactcctgaagtgcactcaatattcctcgaaggtcacacatttcttgtgaggaaccatcgccaggctagcttggaaatctcgccaataactttccttactgctcaaacactcttgatggaccttggacagtttctactgttttgtcatatctcttcccaccaacatgatggcatggaagcttatgtcaaagtagacagctgtccagaggaaccccaactacgaatgaaaaataatgaagaagcggaagactatgatgatgatcttactgattctgaaatggatgtggtcaggtttgatgatgacaactctccttcctttatccaaattcgctcagttgccaagaagcatcctaaaacttgggtacattacattgctgctgaagaggaggactgggactatgctcccttagtcctcgcccccgatgacagaagttataaaagtcaatatttgaacaatggccctcagcggattggtaggaagtacaaaaaagtccgatttatggcatacacagatgaaacctttaagactcgtgaagctattcagcatgaatcaggaatcttgggacctttactttatggggaagttggagacacactgttgattatatttaagaatcaagcaagcagaccatataacatctaccctcacggaatcactgatgtccgtcctttgtattcaaggagattaccaaaaggtgtaaaacatttgaaggattttccaattctgccaggagaaatattcaaatataaatggacagtgactgtagaagatgggccaactaaatcagatcctcggtgcctgacccgctattactctagtttcgttaatatggagagagatctagcttcaggactcattggccctctcctcatctgctacaaagaatctgtagatcaaagaggaaaccagataatgtcagacaagaggaatgtcatcctgttttctgtatttgatgagaaccgaagctggtacctcacagagaatatacaacgctttctccccaatccagctggagtgcagcttgaggatccagagttccaagcctccaacatcatgcacagcatcaatggctatgtttttgatagtttgcagttgtcagtttgtttgcatgaggtggcatactggtacattctaagcattggagcacagactgacttcctttctgtcttcttctctggatataccttcaaacacaaaatggtctatgaagacacactcaccctattcccattctcaggagaaactgtcttcatgtcgatggaaaacccaggtctatggattctggggtgccacaactcagactttcggaacagaggcatgaccgccttactgaaggtttctagttgtgacaagaacactggtgattattacgaggacagttatgaagatatttcagcatacttgctgagtaaaaacaatgccattgaaccaagaagcttctctcaaaacccaccagtcttgaaacgccatcaacgggaaataactcgtactactcttcagtcagatcaagaggaaatcgattatgatgataccatatcagttgaaatgaagaaggaagattttgacatttatgatgaggatgaaaatcagagcccccgcagctttcaaaagaaaacacgacactattttattgctgcagtggagaggctctgggattatgggatgagtagctccccacatgttctaagaaacagggctcagggcgcgccaggttctcctgctggctcccccacctcaacagaagaggggacaagcgaaagcgctacgcctgagagtggccctggctctgagccagccacctccggctctgaaacccctgcctcgagcagggctcagagtggcagtgtccctcagttcaagaaagttgttttccaggaatttactgatggctcctttactcagcccttataccgtggagaactaaatgaacatttgggactcctggggccatatataagagcagaagttgaagataatatcatggtaactttcagaaatcaggcctctcgtccctattccttctattctagccttatttcttatgaggaagatcagaggcaaggagcagaacctagaaaaaactttgtcaagcctaatgaaaccaaaacttacttttggaaagtgcaacatcatatggcacccactaaagatgagtttgactgcaaagcctgggcttatttctctgatgttgacctggaaaaagatgtgcactcaggcctgattggaccccttctggtctgccacactaacacactgaaccctgctcatgggagacaagtgacagtacaggaatttgctctgtttttcaccatctttgatgagaccaaaagctggtacttcactgaaaatatggaaagaaactgcagggctccctgcaatatccagatggaagatcccacttttaaagagaattatcgcttccatgcaatcaatggctacataatggatacactacctggcttagtaatggctcaggatcaaaggattcgatggtatctgctcagcatgggcagcaatgaaaacatccattctattcatttcagtggacatgtgttcactgtacgaaaaaaagaggagtataaaatggcactgtacaatctctatccaggtgtttttgagacagtggaaatgttaccatccaaagctggaatttggcgggtggaatgccttattggcgagcatctacatgctgggatgagcacactttttctggtgtacagcaataagtgtcagactcccctgggaatggcttctggacacattagagattttcagattacagcttcaggacaatatggacagtgggccccaaagctggccagacttcattattccggatcaatcaatgcctggagcaccaaggagcccttttcttggatcaaggtggatctgttggcaccaatgattattcacggcatcaagacccagggtgcccgtcagaagttctccagcctctacatctctcagtttatcatcatgtatagtcttgatgggaagaagtggcagacttatcgaggaaattccactggaaccttaatggtcttctttggcaatgtggattcatctgggataaaacacaatatttttaaccctccaattattgctcgatacatccgtttgcacccaactcattatagcattcgcagcactcttcgcatggagttgatgggctgtgatttaaatagttgcagcatgccattgggaatggagagtaaagcaatatcagatgcacagattactgcttcatcctactttaccaatatgtttgccacctggtctccttcaaaagctcgacttcacctccaagggaggagtaatgcctggagacctcaggtgaataatccaaaagagtggctgcaagtggacttccagaagacaatgaaagtcacaggagtaactactcagggagtaaaatctctgcttaccagcatgtatgtgaaggagttcctcatctccagcagtcaagatggccatcagtggactctcttttttcagaatggcaaagtaaaggtttttcagggaaatcaagactccttcacacctgtggtgaactctctagacccaccgttactgactcgctaccttcgaattcacccccagagttgggtgcaccagattgccctgaggatggaggttctgggctgcgaggcacaggacctctacggcgccggatcacctggggccgaaacggccgaacaaaaactcatctcagaagaggatctgtcacctgcaaccggttga

SEQ ID NO: 754 - protein, 1524 aa, Artificial Sequence
  Description of Artificial Sequence: Synthetic polypeptide
MQIELSTCFFLCLLRFCFSATRRYYLGAVELSWDYMQSDLGELPVDARFPPRVPKSFPFNTSVVYKKTLFVEFTDHLFNIAKPRPPWMGLLGPTIQAEVYDTVVITLKNMASHPVSLHAVGVSYWKASEGAEYDDQTSQREKEDDKVFPGGSHTYVWQVLKENGPMASDPLCLTYSYLSHVDLVKDLNSGLIGALLVCREGSLAKEKTQTLHKFILLFAVFDEGKSWHSETKNSLMQDRDAASARAWPKMHTVNGYVNRSLPGLIGCHRKSVYWHVIGMGTTPEVHSIFLEGHTFLVRNHRQASLEISPITFLTAQTLLMDLGQFLLFCHISSHQHDGMEAYVKVDSCPEEPQLRMKNNEEAEDYDDDLTDSEMDVVRFDDDNSPSFIQIRSVAKKHPKTWVHYIAAEEEDWDYAPLVLAPDDRSYKSQYLNNGPQRIGRKYKKVRFMAYTDETFKTREAIQHESGILGPLLYGEVGDTLLIIFKNQASRPYNIYPHGITDVRPLYSRRLPKGVKHLKDFPILPGEIFKYKWTVTVEDGPTKSDPRCLTRYYSSFVNMERDLASGLIGPLLICYKESVDQRGNQIMSDKRNVILFSVFDENRSWYLTENIQRFLPNPAGVQLEDPEFQASNIMHSINGYVFDSLQLSVCLHEVAYWYILSIGAQTDFLSVFFSGYTFKHKMVYEDTLTLFPFSGETVFMSMENPGLWILGCHNSDFRNRGMTALLKVSSCDKNTGDYYEDSYEDISAYLLSKNNAIEPRSFSQNPPVLKRHQREITRTTLQSDQEEIDYDDTISVEMKKEDFDIYDEDENQSPRSFQKKTRHYFIAAVERLWDYGMSSSPHVLRNRAQSGSVPQFKKVVFQEFTDGSFTQPLYRGELNEHLGLLGPYIRAEVEDNIMVTFRNQASRPYSFYSSLISYEEDQGAPGSPAGSPTSTEEGTSESATPESGPGSEPATSGSETPASSRQGAEPRKNFVKPNETKTYFWKVQHHMAPTKDEFDCKAWAYFSDVDLEKDVHSGLIGPLLVCHTNTLNPAHGRQVTVQEFALFFTIFDETKSWYFTENMERNCRAPCNIQMEDPTFKENYRFHAINGYIMDTLPGLVMAQDQRIRWYLLSMGSNENIHSIHFSGHVFTVRKKEEYKMALYNLYPGVFETVEMLPSKAGIWRVECLIGEHLHAGMSTLFLVYSNKCQTPLGMASGHIRDFQITASGQYGQWAPKLARLHYSGSINAWSTKEPFSWIKVDLLAPMIIHGIKTQGARQKFSSLYISQFIIMYSLDGKKWQTYRGNSTGTLMVFFGNVDSSGIKHNIFNPPIIARYIRLHPTHYSIRSTLRMELMGCDLNSCSMPLGMESKAISDAQITASSYFTNMFATWSPSKARLHLQGRSNAWRPQVNNPKEWLQVDFQKTMKVTGVTTQGVKSLLTSMYVKEFLISSSQDGHQWTLFFQNGKVKVFQGNQDSFTPVVNSLDPPLLTRYLRIHPQSWVHQIALRMEVLGCEAQDLYGAGSPGAETAEQKLISEEDLSPATG

SEQ ID NO: 755 - DNA, 4575 bp, Artificial Sequence
  Description of Artificial Sequence: Synthetic polynucleotide
atgcaaatagagctctccacctgcttctttctgtgccttttgcgattctgctttagtgccaccagaagatactacctgggtgcagtggaactgtcatgggactatatgcaaagtgatctcggtgagctgcctgtggacgcaagatttcctcctagagtgccaaaatcttttccattcaacacctcagtcgtgtacaaaaagactctgtttgtagaattcacggatcaccttttcaacatcgctaagccaaggccaccctggatgggtctgctaggtcctaccatccaggctgaggtttatgatacagtggtcattacacttaagaacatggcttcccatcctgtcagtcttcatgctgttggtgtatcctactggaaagcttctgagggagctgaatatgatgatcagaccagtcaaagggagaaagaagatgataaagtcttccctggtggaagccatacatatgtctggcaggtcctgaaagagaatggtccaatggcctctgacccactgtgccttacctactcatatctttctcatgtggacctggtaaaagacttgaattcaggcctcattggagccctactagtatgtagagaagggagtctggccaaggaaaagacacagaccttgcacaaatttatactactttttgctgtatttgatgaagggaaaagttggcactcagaaacaaagaactccttgatgcaggatagggatgctgcatctgctcgggcctggcctaaaatgcacacagtcaatggttatgtaaacaggtctctgccaggtctgattggatgccacaggaaatcagtctattggcatgtgattggaatgggcaccactcctgaagtgcactcaatattcctcgaaggtcacacatttcttgtgaggaaccatcgccaggctagcttggaaatctcgccaataactttccttactgctcaaacactcttgatggaccttggacagtttctactgttttgtcatatctcttcccaccaacatgatggcatggaagcttatgtcaaagtagacagctgtccagaggaaccccaactacgaatgaaaaataatgaagaagcggaagactatgatgatgatcttactgattctgaaatggatgtggtcaggtttgatgatgacaactctccttcctttatccaaattcgctcagttgccaagaagcatcctaaaacttgggtacattacattgctgctgaagaggaggactgggactatgctcccttagtcctcgcccccgatgacagaagttataaaagtcaatatttgaacaatggccctcagcggattggtaggaagtacaaaaaagtccgatttatggcatacacagatgaaacctttaagactcgtgaagctattcagcatgaatcaggaatcttgggacctttactttatggggaagttggagacacactgttgattatatttaagaatcaagcaagcagaccatataacatctaccctcacggaatcactgatgtccgtcctttgtattcaaggagattaccaaaaggtgtaaaacatttgaaggattttccaattctgccaggagaaatattcaaatataaatggacagtgactgtagaagatgggccaactaaatcagatcctcggtgcctgacccgctattactctagtttcgttaatatggagagagatctagcttcaggactcattggccctctcctcatctgctacaaagaatctgtagatcaaagaggaaaccagataatgtcagacaagaggaatgtcatcctgttttctgtatttgatgagaaccgaagctggtacctcacagagaatatacaacgctttctccccaatccagctggagtgcagcttgaggatccagagttccaagcctccaacatcatgcacagcatcaatggctatgtttttgatagtttgcagttgtcagtttgtttgcatgaggtggcatactggtacattctaagcattggagcacagactgacttcctttctgtcttcttctctggatataccttcaaacacaaaatggtctatgaagacacactcaccctattcccattctcaggagaaactgtcttcatgtcgatggaaaacccaggtctatggattctggggtgccacaactcagactttcggaacagaggcatgaccgccttactgaaggtttctagttgtgacaagaacactggtgattattacgaggacagttatgaagatatttcagcatacttgctgagtaaaaacaatgccattgaaccaagaagcttctctcaaaacccaccagtcttgaaacgccatcaacgggaaataactcgtactactcttcagtcagatcaagaggaaatcgattatgatgataccatatcagttgaaatgaagaaggaagattttgacatttatgatgaggatgaaaatcagagcccccgcagctttcaaaagaaaacacgacactattttattgctgcagtggagaggctctgggattatgggatgagtagctccccacatgttctaagaaacagggctcagagtggcagtgtccctcagttcaagaaagttgttttccaggaatttactgatggctcctttactcagcccttataccgtggagaactaaatgaacatttgggactcctggggccatatataagagcagaagttgaagataatatcatggtaactttcagaaatcaggcctctcgtccctattccttctattctagccttatttcttatgaggaagatcagggcgcgccaggttctcctgctggctcccccacctcaacagaagaggggacaagcgaaagcgctacgcctgagagtggccctggctctgagccagccacctccggctctgaaacccctgcctcgagcaggcaaggagcagaacctagaaaaaactttgtcaagcctaatgaaaccaaaacttacttttggaaagtgcaacatcatatggcacccactaaagatgagtttgactgcaaagcctgggcttatttctctgatgttgacctggaaaaagatgtgcactcaggcctgattggaccccttctggtctgccacactaacacactgaaccctgctcatgggagacaagtgacagtacaggaatttgctctgtttttcaccatctttgatgagaccaaaagctggtacttcactgaaaatatggaaagaaactgcagggctccctgcaatatccagatggaagatcccacttttaaagagaattatcgcttccatgcaatcaatggctacataatggatacactacctggcttagtaatggctcaggatcaaaggattcgatggtatctgctcagcatgggcagcaatgaaaacatccattctattcatttcagtggacatgtgttcactgtacgaaaaaaagaggagtataaaatggcactgtacaatctctatccaggtgtttttgagacagtggaaatgttaccatccaaagctggaatttggcgggtggaatgccttattggcgagcatctacatgctgggatgagcacactttttctggtgtacagcaataagtgtcagactcccctgggaatggcttctggacacattagagattttcagattacagcttcaggacaatatggacagtgggccccaaagctggccagacttcattattccggatcaatcaatgcctggagcaccaaggagcccttttcttggatcaaggtggatctgttggcaccaatgattattcacggcatcaagacccagggtgcccgtcagaagttctccagcctctacatctctcagtttatcatcatgtatagtcttgatgggaagaagtggcagacttatcgaggaaattccactggaaccttaatggtcttctttggcaatgtggattcatctgggataaaacacaatatttttaaccctccaattattgctcgatacatccgtttgcacccaactcattatagcattcgcagcactcttcgcatggagttgatgggctgtgatttaaatagttgcagcatgccattgggaatggagagtaaagcaatatcagatgcacagattactgcttcatcctactttaccaatatgtttgccacctggtctccttcaaaagctcgacttcacctccaagggaggagtaatgcctggagacctcaggtgaataatccaaaagagtggctgcaagtggacttccagaagacaatgaaagtcacaggagtaactactcagggagtaaaatctctgcttaccagcatgtatgtgaaggagttcctcatctccagcagtcaagatggccatcagtggactctcttttttcagaatggcaaagtaaaggtttttcagggaaatcaagactccttcacacctgtggtgaactctctagacccaccgttactgactcgctaccttcgaattcacccccagagttgggtgcaccagattgccctgaggatggaggttctgggctgcgaggcacaggacctctacggcgccggatcacctggggccgaaacggccgaacaaaaactcatctcagaagaggatctgtcacctgcaaccggttga

SEQ ID NO: 756 - protein, 1524 aa, Artificial Sequence
  Description of Artificial Sequence: Synthetic polypeptide
MQIELSTCFFLCLLRFCFSATRRYYLGAVELSWDYMQSDLGELPVDARFPPRVPKSFPFNTSVVYKKTLFVEFTDHLFNIAKPRPPWMGLLGPTIQAEVYDTVVITLKNMASHPVSLHAVGVSYWKASEGAEYDDQTSQREKEDDKVFPGGSHTYVWQVLKENGPMASDPLCLTYSYLSHVDLVKDLNSGLIGALLVCREGSLAKEKTQTLHKFILLFAVFDEGKSWHSETKNSLMQDRDAASARAWPKMHTVNGYVNRSLPGLIGCHRKSVYWHVIGMGTTPEVHSIFLEGHTFLVRNHRQASLEISPITFLTAQTLLMDLGQFLLFCHISSHQHDGMEAYVKVDSCPEEPQLRMKNNEEAEDYDDDLTDSEMDVVRFDDDNSPSFIQIRSVAKKHPKTWVHYIAAEEEDWDYAPLVLAPDDRSYKSQYLNNGPQRIGRKYKKVRFMAYTDETFKTREAIQHESGILGPLLYGEVGDTLLIIFKNQASRPYNIYPHGITDVRPLYSRRLPKGVKHLKDFPILPGEIFKYKWTVTVEDGPTKSDPRCLTRYYSSFVNMERDLASGLIGPLLICYKESVDQRGNQIMSDKRNVILFSVFDENRSWYLTENIQRFLPNPAGVQLEDPEFQASNIMHSINGYVFDSLQLSVCLHEVAYWYILSIGAQTDFLSVFFSGYTFKHKMVYEDTLTLFPFSGETVFMSMENPGLWILGCHNSDFRNRGMTALLKVSSCDKNTGDYYEDSYEDISAYLLSKNNAIEPRSFSQNPPVLKRHQREITRTTLQSDQEEIDYDDTISVEMKKEDFDIYDEDENQSPRSFQKKTRHYFIAAVERLWDYGMSSSPHVLRNRAQSGSVPQFKKVVFQEFTDGSFTQPLYRGELNEHLGLLGPYIRAEVEDNIMVTFRNQASRPYSFYSSLISYEEDQRQGAEPGAPGSPAGSPTSTEEGTSESATPESGPGSEPATSGSETPASSRKNFVKPNETKTYFWKVQHHMAPTKDEFDCKAWAYFSDVDLEKDVHSGLIGPLLVCHTNTLNPAHGRQVTVQEFALFFTIFDETKSWYFTENMERNCRAPCNIQMEDPTFKENYRFHAINGYIMDTLPGLVMAQDQRIRWYLLSMGSNENIHSIHFSGHVFTVRKKEEYKMALYNLYPGVFETVEMLPSKAGIWRVECLIGEHLHAGMSTLFLVYSNKCQTPLGMASGHIRDFQITASGQYGQWAPKLARLHYSGSINAWSTKEPFSWIKVDLLAPMIIHGIKTQGARQKFSSLYISQFIIMYSLDGKKWQTYRGNSTGTLMVFFGNVDSSGIKHNIFNPPIIARYIRLHPTHYSIRSTLRMELMGCDLNSCSMPLGMESKAISDAQITASSYFTNMFATWSPSKARLHLQGRSNAWRPQVNNPKEWLQVDFQKTMKVTGVTTQGVKSLLTSMYVKEFLISSSQDGHQWTLFFQNGKVKVFQGNQDSFTPVVNSLDPPLLTRYLRIHPQSWVHQIALRMEVLGCEAQDLYGAGSPGAETAEQKLISEEDLSPATG

SEQ ID NO: 757 - DNA, 4575 bp, Artificial Sequence
  Description of Artificial Sequence: Synthetic polynucleotide
atgcaaatagagctctccacctgcttctttctgtgccttttgcgattctgctttagtgccaccagaagatactacctgggtgcagtggaactgtcatgggactatatgcaaagtgatctcggtgagctgcctgtggacgcaagatttcctcctagagtgccaaaatcttttccattcaacacctcagtcgtgtacaaaaagactctgtttgtagaattcacggatcaccttttcaacatcgctaagccaaggccaccctggatgggtctgctaggtcctaccatccaggctgaggtttatgatacagtggtcattacacttaagaacatggcttcccatcctgtcagtcttcatgctgttggtgtatcctactggaaagcttctgagggagctgaatatgatgatcagaccagtcaaagggagaaagaagatgataaagtcttccctggtggaagccatacatatgtctggcaggtcctgaaagagaatggtccaatggcctctgacccactgtgccttacctactcatatctttctcatgtggacctggtaaaagacttgaattcaggcctcattggagccctactagtatgtagagaagggagtctggccaaggaaaagacacagaccttgcacaaatttatactactttttgctgtatttgatgaagggaaaagttggcactcagaaacaaagaactccttgatgcaggatagggatgctgcatctgctcgggcctggcctaaaatgcacacagtcaatggttatgtaaacaggtctctgccaggtctgattggatgccacaggaaatcagtctattggcatgtgattggaatgggcaccactcctgaagtgcactcaatattcctcgaaggtcacacatttcttgtgaggaaccatcgccaggctagcttggaaatctcgccaataactttccttactgctcaaacactcttgatggaccttggacagtttctactgttttgtcatatctcttcccaccaacatgatggcatggaagcttatgtcaaagtagacagctgtccagaggaaccccaactacgaatgaaaaataatgaagaagcggaagactatgatgatgatcttactgattctgaaatggatgtggtcaggtttgatgatgacaactctccttcctttatccaaattcgctcagttgccaagaagcatcctaaaacttgggtacattacattgctgctgaagaggaggactgggactatgctcccttagtcctcgcccccgatgacagaagttataaaagtcaatatttgaacaatggccctcagcggattggtaggaagtacaaaaaagtccgatttatggcatacacagatgaaacctttaagactcgtgaagctattcagcatgaatcaggaatcttgggacctttactttatggggaagttggagacacactgttgattatatttaagaatcaagcaagcagaccatataacatctaccctcacggaatcactgatgtccgtcctttgtattcaaggagattaccaaaaggtgtaaaacatttgaaggattttccaattctgccaggagaaatattcaaatataaatggacagtgactgtagaagatgggccaactaaatcagatcctcggtgcctgacccgctattactctagtttcgttaatatggagagagatctagcttcaggactcattggccctctcctcatctgctacaaagaatctgtagatcaaagaggaaaccagataatgtcagacaagaggaatgtcatcctgttttctgtatttgatgagaaccgaagctggtacctcacagagaatatacaacgctttctccccaatccagctggagtgcagcttgaggatccagagttccaagcctccaacatcatgcacagcatcaatggctatgtttttgatagtttgcagttgtcagtttgtttgcatgaggtggcatactggtacattctaagcattggagcacagactgacttcctttctgtcttcttctctggatataccttcaaacacaaaatggtctatgaagacacactcaccctattcccattctcaggagaaactgtcttcatgtcgatggaaaacccaggtctatggattctggggtgccacaactcagactttcggaacagaggcatgaccgccttactgaaggtttctagttgtgacaagaacactggtgattattacgaggacagttatgaagatatttcagcatacttgctgagtaaaaacaatgccattgaaccaagaagcttctctcaaaacccaccagtcttgaaacgccatcaacgggaaataactcgtactactcttcagtcagatcaagaggaaatcgattatgatgataccatatcagttgaaatgaagaaggaagattttgacatttatgatgaggatgaaaatcagagcccccgcagctttcaaaagaaaacacgacactattttattgctgcagtggagaggctctgggattatgggatgagtagctccccacatgttctaagaaacagggctcagagtggcagtgtccctcagttcaagaaagttgttttccaggaatttactgatggctcctttactcagcccttataccgtggagaactaaatgaacatttgggactcctggggccatatataagagcagaagttgaagataatatcatggtaactttcagaaatcaggcctctcgtccctattccttctattctagccttatttcttatgaggaagatcagaggcaaggagcagaacctggcgcgccaggttctcctgctggctcccccacctcaacagaagaggggacaagcgaaagcgctacgcctgagagtggccctggctctgagccagccacctccggctctgaaacccctgcctcgagcagaaaaaactttgtcaagcctaatgaaaccaaaacttacttttggaaagtgcaacatcatatggcacccactaaagatgagtttgactgcaaagcctgggcttatttctctgatgttgacctggaaaaagatgtgcactcaggcctgattggaccccttctggtctgccacactaacacactgaaccctgctcatgggagacaagtgacagtacaggaatttgctctgtttttcaccatctttgatgagaccaaaagctggtacttcactgaaaatatggaaagaaactgcagggctccctgcaatatccagatggaagatcccacttttaaagagaattatcgcttccatgcaatcaatggctacataatggatacactacctggcttagtaatggctcaggatcaaaggattcgatggtatctgctcagcatgggcagcaatgaaaacatccattctattcatttcagtggacatgtgttcactgtacgaaaaaaagaggagtataaaatggcactgtacaatctctatccaggtgtttttgagacagtggaaatgttaccatccaaagctggaatttggcgggtggaatgccttattggcgagcatctacatgctgggatgagcacactttttctggtgtacagcaataagtgtcagactcccctgggaatggcttctggacacattagagattttcagattacagcttcaggacaatatggacagtgggccccaaagctggccagacttcattattccggatcaatcaatgcctggagcaccaaggagcccttttcttggatcaaggtggatctgttggcaccaatgattattcacggcatcaagacccagggtgcccgtcagaagttctccagcctctacatctctcagtttatcatcatgtatagtcttgatgggaagaagtggcagacttatcgaggaaattccactggaaccttaatggtcttctttggcaatgtggattcatctgggataaaacacaatatttttaaccctccaattattgctcgatacatccgtttgcacccaactcattatagcattcgcagcactcttcgcatggagttgatgggctgtgatttaaatagttgcagcatgccattgggaatggagagtaaagcaatatcagatgcacagattactgcttcatcctactttaccaatatgtttgccacctggtctccttcaaaagctcgacttcacctccaagggaggagtaatgcctggagacctcaggtgaataatccaaaagagtggctgcaagtggacttccagaagacaatgaaagtcacaggagtaactactcagggagtaaaatctctgcttaccagcatgtatgtgaaggagttcctcatctccagcagtcaagatggccatcagtggactctcttttttcagaatggcaaagtaaaggtttttcagggaaatcaagactccttcacacctgtggtgaactctctagacccaccgttactgactcgctaccttcgaattcacccccagagttgggtgcaccagattgccctgaggatggaggttctgggctgcgaggcacaggacctctacggcgccggatcacctggggccgaaacggccgaacaaaaactcatctcagaagaggatctgtcacctgcaaccggttga

SEQ ID NO: 758 - protein, 1524 aa, Artificial Sequence
  Description of Artificial Sequence: Synthetic polypeptide
MQIELSTCFFLCLLRFCFSATRRYYLGAVELSWDYMQSDLGELPVDARFPPRVPKSFPFNTSVVYKKTLFVEFTDHLFNIAKPRPPWMGLLGPTIQAEVYDTVVITLKNMASHPVSLHAVGVSYWKASEGAEYDDQTSQREKEDDKVFPGGSHTYVWQVLKENGPMASDPLCLTYSYLSHVDLVKDLNSGLIGALLVCREGSLAKEKTQTLHKFILLFAVFDEGKSWHSETKNSLMQDRDAASARAWPKMHTVNGYVNRSLPGLIGCHRKSVYWHVIGMGTTPEVHSIFLEGHTFLVRNHRQASLEISPITFLTAQTLLMDLGQFLLFCHISSHQHDGMEAYVKVDSCPEEPQLRMKNNEEAEDYDDDLTDSEMDVVRFDDDNSPSFIQIRSVAKKHPKTWVHYIAAEEEDWDYAPLVLAPDDRSYKSQYLNNGPQRIGRKYKKVRFMAYTDETFKTREAIQHESGILGPLLYGEVGDTLLIIFKNQASRPYNIYPHGITDVRPLYSRRLPKGVKHLKDFPILPGEIFKYKWTVTVEDGPTKSDPRCLTRYYSSFVNMERDLASGLIGPLLICYKESVDQRGNQIMSDKRNVILFSVFDENRSWYLTENIQRFLPNPAGVQLEDPEFQASNIMHSINGYVFDSLQLSVCLHEVAYWYILSIGAQTDFLSVFFSGYTFKHKMVYEDTLTLFPFSGETVFMSMENPGLWILGCHNSDFRNRGMTALLKVSSCDKNTGDYYEDSYEDISAYLLSKNNAIEPRSFSQNPPVLKRHQREITRTTLQSDQEEIDYDDTISVEMKKEDFDIYDEDENQSPRSFQKKTRHYFIAAVERLWDYGMSSSPHVLRNRAQSGSVPQFKKVVFQEFTDGSFTQPLYRGELNEHLGLLGPYIRAEVEDNIMVTFRNQASRPYSFYSSLISYEEDQRQGAEPRKNFVKPNETKTYFWKVQHHMAPTKGAPGSPAGSPTSTEEGTSESATPESGPGSEPATSGSETPASSDEFDCKAWAYFSDVDLEKDVHSGLIGPLLVCHTNTLNPAHGRQVTVQEFALFFTIFDETKSWYFTENMERNCRAPCNIQMEDPTFKENYRFHAINGYIMDTLPGLVMAQDQRIRWYLLSMGSNENIHSIHFSGHVFTVRKKEEYKMALYNLYPGVFETVEMLPSKAGIWRVECLIGEHLHAGMSTLFLVYSNKCQTPLGMASGHIRDFQITASGQYGQWAPKLARLHYSGSINAWSTKEPFSWIKVDLLAPMIIHGIKTQGARQKFSSLYISQFIIMYSLDGKKWQTYRGNSTGTLMVFFGNVDSSGIKHNIFNPPIIARYIRLHPTHYSIRSTLRMELMGCDLNSCSMPLGMESKAISDAQITASSYFTNMFATWSPSKARLHLQGRSNAWRPQVNNPKEWLQVDFQKTMKVTGVTTQGVKSLLTSMYVKEFLISSSQDGHQWTLFFQNGKVKVFQGNQDSFTPVVNSLDPPLLTRYLRIHPQSWVHQIALRMEVLGCEAQDLYGAGSPGAETAEQKLISEEDLSPATG

SEQ ID NO: 759 - DNA, 4575 bp, Artificial Sequence
  Description of Artificial Sequence: Synthetic polynucleotide
atgcaaatagagctctccacctgcttctttctgtgccttttgcgattctgctttagtgccaccagaagatactacctgggtgcagtggaactgtcatgggactatatgcaaagtgatctcggtgagctgcctgtggacgcaagatttcctcctagagtgccaaaatcttttccattcaacacctcagtcgtgtacaaaaagactctgtttgtagaattcacggatcaccttttcaacatcgctaagccaaggccaccctggatgggtctgctaggtcctaccatccaggctgaggtttatgatacagtggtcattacacttaagaacatggcttcccatcctgtcagtcttcatgctgttggtgtatcctactggaaagcttctgagggagctgaatatgatgatcagaccagtcaaagggagaaagaagatgataaagtcttccctggtggaagccatacatatgtctggcaggtcctgaaagagaatggtccaatggcctctgacccactgtgccttacctactcatatctttctcatgtggacctggtaaaagacttgaattcaggcctcattggagccctactagtatgtagagaagggagtctggccaaggaaaagacacagaccttgcacaaatttatactactttttgctgtatttgatgaagggaaaagttggcactcagaaacaaagaactccttgatgcaggatagggatgctgcatctgctcgggcctggcctaaaatgcacacagtcaatggttatgtaaacaggtctctgccaggtctgattggatgccacaggaaatcagtctattggcatgtgattggaatgggcaccactcctgaagtgcactcaatattcctcgaaggtcacacatttcttgtgaggaaccatcgccaggctagcttggaaatctcgccaataactttccttactgctcaaacactcttgatggaccttggacagtttctactgttttgtcatatctcttcccaccaacatgatggcatggaagcttatgtcaaagtagacagctgtccagaggaaccccaactacgaatgaaaaataatgaagaagcggaagactatgatgatgatcttactgattctgaaatggatgtggtcaggtttgatgatgacaactctccttcctttatccaaattcgctcagttgccaagaagcatcctaaaacttgggtacattacattgctgctgaagaggaggactgggactatgctcccttagtcctcgcccccgatgacagaagttataaaagtcaatatttgaacaatggccctcagcggattggtaggaagtacaaaaaagtccgatttatggcatacacagatgaaacctttaagactcgtgaagctattcagcatgaatcaggaatcttgggacctttactttatggggaagttggagacacactgttgattatatttaagaatcaagcaagcagaccatataacatctaccctcacggaatcactgatgtccgtcctttgtattcaaggagattaccaaaaggtgtaaaacatttgaaggattttccaattctgccaggagaaatattcaaatataaatggacagtgactgtagaagatgggccaactaaatcagatcctcggtgcctgacccgctattactctagtttcgttaatatggagagagatctagcttcaggactcattggccctctcctcatctgctacaaagaatctgtagatcaaagaggaaaccagataatgtcagacaagaggaatgtcatcctgttttctgtatttgatgagaaccgaagctggtacctcacagagaatatacaacgctttctccccaatccagctggagtgcagcttgaggatccagagttccaagcctccaacatcatgcacagcatcaatggctatgtttttgatagtttgcagttgtcagtttgtttgcatgaggtggcatactggtacattctaagcattggagcacagactgacttcctttctgtcttcttctctggatataccttcaaacacaaaatggtctatgaagacacactcaccctattcccattctcaggagaaactgtcttcatgtcgatggaaaacccaggtctatggattctggggtgccacaactcagactttcggaacagaggcatgaccgccttactgaaggtttctagttgtgacaagaacactggtgattattacgaggacagttatgaagatatttcagcatacttgctgagtaaaaacaatgccattgaaccaagaagcttctctcaaaacccaccagtcttgaaacgccatcaacgggaaataactcgtactactcttcagtcagatcaagaggaaatcgattatgatgataccatatcagttgaaatgaagaaggaagattttgacatttatgatgaggatgaaaatcagagcccccgcagctttcaaaagaaaacacgacactattttattgctgcagtggagaggctctgggattatgggatgagtagctccccacatgttctaagaaacagggctcagagtggcagtgtccctcagttcaagaaagttgttttccaggaatttactgatggctcctttactcagcccttataccgtggagaactaaatgaacatttgggactcctggggccatatataagagcagaagttgaagataatatcatggtaactttcagaaatcaggcctctcgtccctattccttctattctagccttatttcttatgaggaagatcagaggcaaggagcagaacctagaaaaaactttgtcaagcctaatgaaaccaaaacttacttttggaaagtgcaacatcatatggcacccactaaaggcgcgccaggttctcctgctggctcccccacctcaacagaagaggggacaagcgaaagcgctacgcctgagagtggccctggctctgagccagccacctccggctctgaaacccctgcctcgagcgatgagtttgactgcaaagcctgggcttatttctctgatgttgacctggaaaaagatgtgcactcaggcctgattggaccccttctggtctgccacactaacacactgaaccctgctcatgggagacaagtgacagtacaggaatttgctctgtttttcaccatctttgatgagaccaaaagctggtacttcactgaaaatatggaaagaaactgcagggctccctgcaatatccagatggaagatcccacttttaaagagaattatcgcttccatgcaatcaatggctacataatggatacactacctggcttagtaatggctcaggatcaaaggattcgatggtatctgctcagcatgggcagcaatgaaaacatccattctattcatttcagtggacatgtgttcactgtacgaaaaaaagaggagtataaaatggcactgtacaatctctatccaggtgtttttgagacagtggaaatgttaccatccaaagctggaatttggcgggtggaatgccttattggcgagcatctacatgctgggatgagcacactttttctggtgtacagcaataagtgtcagactcccctgggaatggcttctggacacattagagattttcagattacagcttcaggacaatatggacagtgggccccaaagctggccagacttcattattccggatcaatcaatgcctggagcaccaaggagcccttttcttggatcaaggtggatctgttggcaccaatgattattcacggcatcaagacccagggtgcccgtcagaagttctccagcctctacatctctcagtttatcatcatgtatagtcttgatgggaagaagtggcagacttatcgaggaaattccactggaaccttaatggtcttctttggcaatgtggattcatctgggataaaacacaatatttttaaccctccaattattgctcgatacatccgtttgcacccaactcattatagcattcgcagcactcttcgcatggagttgatgggctgtgatttaaatagttgcagcatgccattgggaatggagagtaaagcaatatcagatgcacagattactgcttcatcctactttaccaatatgtttgccacctggtctccttcaaaagctcgacttcacctccaagggaggagtaatgcctggagacctcaggtgaataatccaaaagagtggctgcaagtggacttccagaagacaatgaaagtcacaggagtaactactcagggagtaaaatctctgcttaccagcatgtatgtgaaggagttcctcatctccagcagtcaagatggccatcagtggactctcttttttcagaatggcaaagtaaaggtttttcagggaaatcaagactccttcacacctgtggtgaactctctagacccaccgttactgactcgctaccttcgaattcacccccagagttgggtgcaccagattgccctgaggatggaggttctgggctgcgaggcacaggacctctacggcgccggatcacctggggccgaaacggccgaacaaaaactcatctcagaagaggatctgtcacctgcaaccggttga

SEQ ID NO: 760 - protein, 1524 aa, Artificial Sequence
  Description of Artificial Sequence: Synthetic polypeptide
MQIELSTCFFLCLLRFCFSATRRYYLGAVELSWDYMQSDLGELPVDARFPPRVPKSFPFNTSVVYKKTLFVEFTDHLFNIAKPRPPWMGLLGPTIQAEVYDTVVITLKNMASHPVSLHAVGVSYWKASEGAEYDDQTSQREKEDDKVFPGGSHTYVWQVLKENGPMASDPLCLTYSYLSHVDLVKDLNSGLIGALLVCREGSLAKEKTQTLHKFILLFAVFDEGKSWHSETKNSLMQDRDAASARAWPKMHTVNGYVNRSLPGLIGCHRKSVYWHVIGMGTTPEVHSIFLEGHTFLVRNHRQASLEISPITFLTAQTLLMDLGQFLLFCHISSHQHDGMEAYVKVDSCPEEPQLRMKNNEEAEDYDDDLTDSEMDVVRFDDDNSPSFIQIRSVAKKHPKTWVHYIAAEEEDWDYAPLVLAPDDRSYKSQYLNNGPQRIGRKYKKVRFMAYTDETFKTREAIQHESGILGPLLYGEVGDTLLIIFKNQASRPYNIYPHGITDVRPLYSRRLPKGVKHLKDFPILPGEIFKYKWTVTVEDGPTKSDPRCLTRYYSSFVNMERDLASGLIGPLLICYKESVDQRGNQIMSDKRNVILFSVFDENRSWYLTENIQRFLPNPAGVQLEDPEFQASNIMHSINGYVFDSLQLSVCLHEVAYWYILSIGAQTDFLSVFFSGYTFKHKMVYEDTLTLFPFSGETVFMSMENPGLWILGCHNSDFRNRGMTALLKVSSCDKNTGDYYEDSYEDISAYLLSKNNAIEPRSFSQNPPVLKRHQREITRTTLQSDQEEIDYDDTISVEMKKEDFDIYDEDENQSPRSFQKKTRHYFIAAVERLWDYGMSSSPHVLRNRAQSGSVPQFKKVVFQEFTDGSFTQPLYRGELNEHLGLLGPYIRAEVEDNIMVTFRNQASRPYSFYSSLISYEEDQRQGAEPRKNFVKPNETKTYFWKVQHHMAPTKDEFDCKAWAYFSDVDLEKDVHSGLIGPLLVCHTNGAPGSPAGSPTSTEEGTSESATPESGPGSEPATSGSETPASSTLNPAHGRQVTVQEFALFFTIFDETKSWYFTENMERNCRAPCNIQMEDPTFKENYRFHAINGYIMDTLPGLVMAQDQRIRWYLLSMGSNENIHSIHFSGHVFTVRKKEEYKMALYNLYPGVFETVEMLPSKAGIWRVECLIGEHLHAGMSTLFLVYSNKCQTPLGMASGHIRDFQITASGQYGQWAPKLARLHYSGSINAWSTKEPFSWIKVDLLAPMIIHGIKTQGARQKFSSLYISQFIIMYSLDGKKWQTYRGNSTGTLMVFFGNVDSSGIKHNIFNPPIIARYIRLHPTHYSIRSTLRMELMGCDLNSCSMPLGMESKAISDAQITASSYFTNMFATWSPSKARLHLQGRSNAWRPQVNNPKEWLQVDFQKTMKVTGVTTQGVKSLLTSMYVKEFLISSSQDGHQWTLFFQNGKVKVFQGNQDSFTPVVNSLDPPLLTRYLRIHPQSWVHQIALRMEVLGCEAQDLYGAGSPGAETAEQKLISEEDLSPATG

SEQ ID NO: 761 - DNA, 4575 bp, Artificial Sequence
  Description of Artificial Sequence: Synthetic polynucleotide
atgcaaatagagctctccacctgcttctttctgtgccttttgcgattctgctttagtgccaccagaagatactacctgggtgcagtggaactgtcatgggactatatgcaaagtgatctcggtgagctgcctgtggacgcaagatttcctcctagagtgccaaaatcttttccattcaacacctcagtcgtgtacaaaaagactctgtttgtagaattcacggatcaccttttcaacatcgctaagccaaggccaccctggatgggtctgctaggtcctaccatccaggctgaggtttatgatacagtggtcattacacttaagaacatggcttcccatcctgtcagtcttcatgctgttggtgtatcctactggaaagcttctgagggagctgaatatgatgatcagaccagtcaaagggagaaagaagatgataaagtcttccctggtggaagccatacatatgtctggcaggtcctgaaagagaatggtccaatggcctctgacccactgtgccttacctactcatatctttctcatgtggacctggtaaaagacttgaattcaggcctcattggagccctactagtatgtagagaagggagtctggccaaggaaaagacacagaccttgcacaaatttatactactttttgctgtatttgatgaagggaaaagttggcactcagaaacaaagaactccttgatgcaggatagggatgctgcatctgctcgggcctggcctaaaatgcacacagtcaatggttatgtaaacaggtctctgccaggtctgattggatgccacaggaaatcagtctattggcatgtgattggaatgggcaccactcctgaagtgcactcaatattcctcgaaggtcacacatttcttgtgaggaaccatcgccaggctagcttggaaatctcgccaataactttccttactgctcaaacactcttgatggaccttggacagtttctactgttttgtcatatctcttcccaccaacatgatggcatggaagcttatgtcaaagtagacagctgtccagaggaaccccaactacgaatgaaaaataatgaagaagcggaagactatgatgatgatcttactgattctgaaatggatgtggtcaggtttgatgatgacaactctccttcctttatccaaattcgctcagttgccaagaagcatcctaaaacttgggtacattacattgctgctgaagaggaggactgggactatgctcccttagtcctcgcccccgatgacagaagttataaaagtcaatatttgaacaatggccctcagcggattggtaggaagtacaaaaaagtccgatttatggcatacacagatgaaacctttaagactcgtgaagctattcagcatgaatcaggaatcttgggacctttactttatggggaagttggagacacactgttgattatatttaagaatcaagcaagcagaccatataacatctaccctcacggaatcactgatgtccgtcctttgtattcaaggagattaccaaaaggtgtaaaacatttgaaggattttccaattctgccaggagaaatattcaaatataaatggacagtgactgtagaagatgggccaactaaatcagatcctcggtgcctgacccgctattactctagtttcgttaatatggagagagatctagcttcaggactcattggccctctcctcatctgctacaaagaatctgtagatcaaagaggaaaccagataatgtcagacaagaggaatgtcatcctgttttctgtatttgatgagaaccgaagctggtacctcacagagaatatacaacgctttctccccaatccagctggagtgcagcttgaggatccagagttccaagcctccaacatcatgcacagcatcaatggctatgtttttgatagtttgcagttgtcagtttgtttgcatgaggtggcatactggtacattctaagcattggagcacagactgacttcctttctgtcttcttctctggatataccttcaaacacaaaatggtctatgaagacacactcaccctattcccattctcaggagaaactgtcttcatgtcgatggaaaacccaggtctatggattctggggtgccacaactcagactttcggaacagaggcatgaccgccttactgaaggtttctagttgtgacaagaacactggtgattattacgaggacagttatgaagatatttcagcatacttgctgagtaaaaacaatgccattgaaccaagaagcttctctcaaaacccaccagtcttgaaacgccatcaacgggaaataactcgtactactcttcagtcagatcaagaggaaatcgattatgatgataccatatcagttgaaatgaagaaggaagattttgacatttatgatgaggatgaaaatcagagcccccgcagctttcaaaagaaaacacgacactattttattgctgcagtggagaggctctgggattatgggatgagtagctccccacatgttctaagaaacagggctcagagtggcagtgtccctcagttcaagaaagttgttttccaggaatttactgatggctcctttactcagcccttataccgtggagaactaaatgaacatttgggactcctggggccatatataagagcagaagttgaagataatatcatggtaactttcagaaatcaggcctctcgtccctattccttctattctagccttatttcttatgaggaagatcagaggcaaggagcagaacctagaaaaaactttgtcaagcctaatgaaaccaaaacttacttttggaaagtgcaacatcatatggcacccactaaagatgagtttgactgcaaagcctgggcttatttctctgatgttgacctggaaaaagatgtgcactcaggcctgattggaccccttctggtctgccacactaacggcgcgccaggttctcctgctggctcccccacctcaacagaagaggggacaagcgaaagcgctacgcctgagagtggccctggctctgagccagccacctccggctctgaaacccctgcctcgagcacactgaaccctgctcatgggagacaagtgacagtacaggaatttgctctgtttttcaccatctttgatgagaccaaaagctggtacttcactgaaaatatggaaagaaactgcagggctccctgcaatatccagatggaagatcccacttttaaagagaattatcgcttccatgcaatcaatggctacataatggatacactacctggcttagtaatggctcaggatcaaaggattcgatggtatctgctcagcatgggcagcaatgaaaacatccattctattcatttcagtggacatgtgttcactgtacgaaaaaaagaggagtataaaatggcactgtacaatctctatccaggtgtttttgagacagtggaaatgttaccatccaaagctggaatttggcgggtggaatgccttattggcgagcatctacatgctgggatgagcacactttttctggtgtacagcaataagtgtcagactcccctgggaatggcttctggacacattagagattttcagattacagcttcaggacaatatggacagtgggccccaaagctggccagacttcattattccggatcaatcaatgcctggagcaccaaggagcccttttcttggatcaaggtggatctgttggcaccaatgattattcacggcatcaagacccagggtgcccgtcagaagttctccagcctctacatctctcagtttatcatcatgtatagtcttgatgggaagaagtggcagacttatcgaggaaattccactggaaccttaatggtcttctttggcaatgtggattcatctgggataaaacacaatatttttaaccctccaattattgctcgatacatccgtttgcacccaactcattatagcattcgcagcactcttcgcatggagttgatgggctgtgatttaaatagttgcagcatgccattgggaatggagagtaaagcaatatcagatgcacagattactgcttcatcctactttaccaatatgtttgccacctggtctccttcaaaagctcgacttcacctccaagggaggagtaatgcctggagacctcaggtgaataatccaaaagagtggctgcaagtggacttccagaagacaatgaaagtcacaggagtaactactcagggagtaaaatctctgcttaccagcatgtatgtgaaggagttcctcatctccagcagtcaagatggccatcagtggactctcttttttcagaatggcaaagtaaaggtttttcagggaaatcaagactccttcacacctgtggtgaactctctagacccaccgttactgactcgctaccttcgaattcacccccagagttgggtgcaccagattgccctgaggatggaggttctgggctgcgaggcacaggacctctacggcgccggatcacctggggccgaaacggccgaacaaaaactcatctcagaagaggatctgtcacctgcaaccggttga

SEQ ID NO: 762 - protein, 1524 aa, Artificial Sequence
  Description of Artificial Sequence: Synthetic polypeptide
MQIELSTCFFLCLLRFCFSATRRYYLGAVELSWDYMQSDLGELPVDARFPPRVPKSFPFNTSVVYKKTLFVEFTDHLFNIAKPRPPWMGLLGPTIQAEVYDTVVITLKNMASHPVSLHAVGVSYWKASEGAEYDDQTSQREKEDDKVFPGGSHTYVWQVLKENGPMASDPLCLTYSYLSHVDLVKDLNSGLIGALLVCREGSLAKEKTQTLHKFILLFAVFDEGKSWHSETKNSLMQDRDAASARAWPKMHTVNGYVNRSLPGLIGCHRKSVYWHVIGMGTTPEVHSIFLEGHTFLVRNHRQASLEISPITFLTAQTLLMDLGQFLLFCHISSHQHDGMEAYVKVDSCPEEPQLRMKNNEEAEDYDDDLTDSEMDVVRFDDDNSPSFIQIRSVAKKHPKTWVHYIAAEEEDWDYAPLVLAPDDRSYKSQYLNNGPQRIGRKYKKVRFMAYTDETFKTREAIQHESGILGPLLYGEVGDTLLIIFKNQASRPYNIYPHGITDVRPLYSRRLPKGVKHLKDFPILPGEIFKYKWTVTVEDGPTKSDPRCLTRYYSSFVNMERDLASGLIGPLLICYKESVDQRGNQIMSDKRNVILFSVFDENRSWYLTENIQRFLPNPAGVQLEDPEFQASNIMHSINGYVFDSLQLSVCLHEVAYWYILSIGAQTDFLSVFFSGYTFKHKMVYEDTLTLFPFSGETVFMSMENPGLWILGCHNSDFRNRGMTALLKVSSCDKNTGDYYEDSYEDISAYLLSKNNAIEPRSFSQNPPVLKRHQREITRTTLQSDQEEIDYDDTISVEMKKEDFDIYDEDENQSPRSFQKKTRHYFIAAVERLWDYGMSSSPHVLRNRAQSGSVPQFKKVVFQEFTDGSFTQPLYRGELNEHLGLLGPYIRAEVEDNIMVTFRNQASRPYSFYSSLISYEEDQRQGAEPRKNFVKPNETKTYFWKVQHHMAPTKDEFDCKAWAYFSDVDLEKDVHSGLIGPLLVCHTNTLNPAHGRQVTVQEFALFFTIFDETKSWYFTENMEGAPGSPAGSPTSTEEGTSESATPESGPGSEPATSGSETPASSRNCRAPCNIQMEDPTFKENYRFHAINGYIMDTLPGLVMAQDQRIRWYLLSMGSNENIHSIHFSGHVFTVRKKEEYKMALYNLYPGVFETVEMLPSKAGIWRVECLIGEHLHAGMSTLFLVYSNKCQTPLGMASGHIRDFQITASGQYGQWAPKLARLHYSGSINAWSTKEPFSWIKVDLLAPMIIHGIKTQGARQKFSSLYISQFIIMYSLDGKKWQTYRGNSTGTLMVFFGNVDSSGIKHNIFNPPIIARYIRLHPTHYSIRSTLRMELMGCDLNSCSMPLGMESKAISDAQITASSYFTNMFATWSPSKARLHLQGRSNAWRPQVNNPKEWLQVDFQKTMKVTGVTTQGVKSLLTSMYVKEFLISSSQDGHQWTLFFQNGKVKVFQGNQDSFTPVVNSLDPPLLTRYLRIHPQSWVHQIALRMEVLGCEAQDLYGAGSPGAETAEQKLISEEDLSPATG

SEQ ID NO: 763 - DNA, 4575 bp, Artificial Sequence
  Description of Artificial Sequence: Synthetic polynucleotide
atgcaaatagagctctccacctgcttctttctgtgccttttgcgattctgctttagtgccaccagaagatactacctgggtgcagtggaactgtcatgggactatatgcaaagtgatctcggtgagctgcctgtggacgcaagatttcctcctagagtgccaaaatcttttccattcaacacctcagtcgtgtacaaaaagactctgtttgtagaattcacggatcaccttttcaacatcgctaagccaaggccaccctggatgggtctgctaggtcctaccatccaggctgaggtttatgatacagtggtcattacacttaagaacatggcttcccatcctgtcagtcttcatgctgttggtgtatcctactggaaagcttctgagggagctgaatatgatgatcagaccagtcaaagggagaaagaagatgataaagtcttccctggtggaagccatacatatgtctggcaggtcctgaaagagaatggtccaatggcctctgacccactgtgccttacctactcatatctttctcatgtggacctggtaaaagacttgaattcaggcctcattggagccctactagtatgtagagaagggagtctggccaaggaaaagacacagaccttgcacaaatttatactactttttgctgtatttgatgaagggaaaagttggcactcagaaacaaagaactccttgatgcaggatagggatgctgcatctgctcgggcctggcctaaaatgcacacagtcaatggttatgtaaacaggtctctgccaggtctgattggatgccacaggaaatcagtctattggcatgtgattggaatgggcaccactcctgaagtgcactcaatattcctcgaaggtcacacatttcttgtgaggaaccatcgccaggctagcttggaaatctcgccaataactttccttactgctcaaacactcttgatggaccttggacagtttctactgttttgtcatatctcttcccaccaacatgatggcatggaagcttatgtcaaagtagacagctgtccagaggaaccccaactacgaatgaaaaataatgaagaagcggaagactatgatgatgatcttactgattctgaaatggatgtggtcaggtttgatgatgacaactctccttcctttatccaaattcgctcagttgccaagaagcatcctaaaacttgggtacattacattgctgctgaagaggaggactgggactatgctcccttagtcctcgcccccgatgacagaagttataaaagtcaatatttgaacaatggccctcagcggattggtaggaagtacaaaaaagtccgatttatggcatacacagatgaaacctttaagactcgtgaagctattcagcatgaatcaggaatcttgggacctttactttatggggaagttggagacacactgttgattatatttaagaatcaagcaagcagaccatataacatctaccctcacggaatcactgatgtccgtcctttgtattcaaggagattaccaaaaggtgtaaaacatttgaaggattttccaattctgccaggagaaatattcaaatataaatggacagtgactgtagaagatgggccaactaaatcagatcctcggtgcctgacccgctattactctagtttcgttaatatggagagagatctagcttcaggactcattggccctctcctcatctgctacaaagaatctgtagatcaaagaggaaaccagataatgtcagacaagaggaatgtcatcctgttttctgtatttgatgagaaccgaagctggtacctcacagagaatatacaacgctttctccccaatccagctggagtgcagcttgaggatccagagttccaagcctccaacatcatgcacagcatcaatggctatgtttttgatagtttgcagttgtcagtttgtttgcatgaggtggcatactggtacattctaagcattggagcacagactgacttcctttctgtcttcttctctggatataccttcaaacacaaaatggtctatgaagacacactcaccctattcccattctcaggagaaactgtcttcatgtcgatggaaaacccaggtctatggattctggggtgccacaactcagactttcggaacagaggcatgaccgccttactgaaggtttctagttgtgacaagaacactggtgattattacgaggacagttatgaagatatttcagcatacttgctgagtaaaaacaatgccattgaaccaagaagcttctctcaaaacccaccagtcttgaaacgccatcaacgggaaataactcgtactactcttcagtcagatcaagaggaaatcgattatgatgataccatatcagttgaaatgaagaaggaagattttgacatttatgatgaggatgaaaatcagagcccccgcagctttcaaaagaaaacacgacactattttattgctgcagtggagaggctctgggattatgggatgagtagctccccacatgttctaagaaacagggctcagagtggcagtgtccctcagttcaagaaagttgttttccaggaatttactgatggctcctttactcagcccttataccgtggagaactaaatgaacatttgggactcctggggccatatataagagcagaagttgaagataatatcatggtaactttcagaaatcaggcctctcgtccctattccttctattctagccttatttcttatgaggaagatcagaggcaaggagcagaacctagaaaaaactttgtcaagcctaatgaaaccaaaacttacttttggaaagtgcaacatcatatggcacccactaaagatgagtttgactgcaaagcctgggcttatttctctgatgttgacctggaaaaagatgtgcactcaggcctgattggaccccttctggtctgccacactaacacactgaaccctgctcatgggagacaagtgacagtacaggaatttgctctgtttttcaccatctttgatgagaccaaaagctggtacttcactgaaaatatggaaggcgcgccaggttctcctgctggctcccccacctcaacagaagaggggacaagcgaaagcgctacgcctgagagtggccctggctctgagccagccacctccggctctgaaacccctgcctcgagcagaaactgcagggctccctgcaatatccagatggaagatcccacttttaaagagaattatcgcttccatgcaatcaatggctacataatggatacactacctggcttagtaatggctcaggatcaaaggattcgatggtatctgctcagcatgggcagcaatgaaaacatccattctattcatttcagtggacatgtgttcactgtacgaaaaaaagaggagtataaaatggcactgtacaatctctatccaggtgtttttgagacagtggaaatgttaccatccaaagctggaatttggcgggtggaatgccttattggcgagcatctacatgctgggatgagcacactttttctggtgtacagcaataagtgtcagactcccctgggaatggcttctggacacattagagattttcagattacagcttcaggacaatatggacagtgggccccaaagctggccagacttcattattccggatcaatcaatgcctggagcaccaaggagcccttttcttggatcaaggtggatctgttggcaccaatgattattcacggcatcaagacccagggtgcccgtcagaagttctccagcctctacatctctcagtttatcatcatgtatagtcttgatgggaagaagtggcagacttatcgaggaaattccactggaaccttaatggtcttctttggcaatgtggattcatctgggataaaacacaatatttttaaccctccaattattgctcgatacatccgtttgcacccaactcattatagcattcgcagcactcttcgcatggagttgatgggctgtgatttaaatagttgcagcatgccattgggaatggagagtaaagcaatatcagatgcacagattactgcttcatcctactttaccaatatgtttgccacctggtctccttcaaaagctcgacttcacctccaagggaggagtaatgcctggagacctcaggtgaataatccaaaagagtggctgcaagtggacttccagaagacaatgaaagtcacaggagtaactactcagggagtaaaatctctgcttaccagcatgtatgtgaaggagttcctcatctccagcagtcaagatggccatcagtggactctcttttttcagaatggcaaagtaaaggtttttcagggaaatcaagactccttcacacctgtggtgaactctctagacccaccgttactgactcgctaccttcgaattcacccccagagttgggtgcaccagattgccctgaggatggaggttctgggctgcgaggcacaggacctctacggcgccggatcacctggggccgaaacggccgaacaaaaactcatctcagaagaggatctgtcacctgcaaccggttga

SEQ ID NO: 764 - protein, 1524 aa, Artificial Sequence
  Description of Artificial Sequence: Synthetic polypeptide
MQIELSTCFFLCLLRFCFSATRRYYLGAVELSWDYMQSDLGELPVDARFPPRVPKSFPFNTSVVYKKTLFVEFTDHLFNIAKPRPPWMGLLGPTIQAEVYDTVVITLKNMASHPVSLHAVGVSYWKASEGAEYDDQTSQREKEDDKVFPGGSHTYVWQVLKENGPMASDPLCLTYSYLSHVDLVKDLNSGLIGALLVCREGSLAKEKTQTLHKFILLFAVFDEGKSWHSETKNSLMQDRDAASARAWPKMHTVNGYVNRSLPGLIGCHRKSVYWHVIGMGTTPEVHSIFLEGHTFLVRNHRQASLEISPITFLTAQTLLMDLGQFLLFCHISSHQHDGMEAYVKVDSCPEEPQLRMKNNEEAEDYDDDLTDSEMDVVRFDDDNSPSFIQIRSVAKKHPKTWVHYIAAEEEDWDYAPLVLAPDDRSYKSQYLNNGPQRIGRKYKKVRFMAYTDETFKTREAIQHESGILGPLLYGEVGDTLLIIFKNQASRPYNIYPHGITDVRPLYSRRLPKGVKHLKDFPILPGEIFKYKWTVTVEDGPTKSDPRCLTRYYSSFVNMERDLASGLIGPLLICYKESVDQRGNQIMSDKRNVILFSVFDENRSWYLTENIQRFLPNPAGVQLEDPEFQASNIMHSINGYVFDSLQLSVCLHEVAYWYILSIGAQTDFLSVFFSGYTFKHKMVYEDTLTLFPFSGETVFMSMENPGLWILGCHNSDFRNRGMTALLKVSSCDKNTGDYYEDSYEDISAYLLSKNNAIEPRSFSQNPPVLKRHQREITRTTLQSDQEEIDYDDTISVEMKKEDFDIYDEDENQSPRSFQKKTRHYFIAAVERLWDYGMSSSPHVLRNRAQSGSVPQFKKVVFQEFTDGSFTQPLYRGELNEHLGLLGPYIRAEVEDNIMVTFRNQASRPYSFYSSLISYEEDQRQGAEPRKNFVKPNETKTYFWKVQHHMAPTKDEFDCKAWAYFSDVDLEKDVHSGLIGPLLVCHTNTLNPAHGRQVTVQEFALFFTIFDETKSWYFTENMERNCRGAPGSPAGSPTSTEEGTSESATPESGPGSEPATSGSETPASSAPCNIQMEDPTFKENYRFHAINGYIMDTLPGLVMAQDQRIRWYLLSMGSNENIHSIHFSGHVFTVRKKEEYKMALYNLYPGVFETVEMLPSKAGIWRVECLIGEHLHAGMSTLFLVYSNKCQTPLGMASGHIRDFQITASGQYGQWAPKLARLHYSGSINAWSTKEPFSWIKVDLLAPMIIHGIKTQGARQKFSSLYISQFIIMYSLDGKKWQTYRGNSTGTLMVFFGNVDSSGIKHNIFNPPIIARYIRLHPTHYSIRSTLRMELMGCDLNSCSMPLGMESKAISDAQITASSYFTNMFATWSPSKARLHLQGRSNAWRPQVNNPKEWLQVDFQKTMKVTGVTTQGVKSLLTSMYVKEFLISSSQDGHQWTLFFQNGKVKVFQGNQDSFTPVVNSLDPPLLTRYLRIHPQSWVHQIALRMEVLGCEAQDLYGAGSPGAETAEQKLISEEDLSPATG

SEQ ID NO: 765 - DNA, 4575 bp, Artificial Sequence
  Description of Artificial Sequence: Synthetic polynucleotide
atgcaaatagagctctccacctgcttctttctgtgccttttgcgattctgctttagtgccaccagaagatactacctgggtgcagtggaactgtcatgggactatatgcaaagtgatctcggtgagctgcctgtggacgcaagatttcctcctagagtgccaaaatcttttccattcaacacctcagtcgtgtacaaaaagactctgtttgtagaattcacggatcaccttttcaacatcgctaagccaaggccaccctggatgggtctgctaggtcctaccatccaggctgaggtttatgatacagtggtcattacacttaagaacatggcttcccatcctgtcagtcttcatgctgttggtgtatcctactggaaagcttctgagggagctgaatatgatgatcagaccagtcaaagggagaaagaagatgataaagtcttccctggtggaagccatacatatgtctggcaggtcctgaaagagaatggtccaatggcctctgacccactgtgccttacctactcatatctttctcatgtggacctggtaaaagacttgaattcaggcctcattggagccctactagtatgtagagaagggagtctggccaaggaaaagacacagaccttgcacaaatttatactactttttgctgtatttgatgaagggaaaagttggcactcagaaacaaagaactccttgatgcaggatagggatgctgcatctgctcgggcctggcctaaaatgcacacagtcaatggttatgtaaacaggtctctgccaggtctgattggatgccacaggaaatcagtctattggcatgtgattggaatgggcaccactcctgaagtgcactcaatattcctcgaaggtcacacatttcttgtgaggaaccatcgccaggctagcttggaaatctcgccaataactttccttactgctcaaacactcttgatggaccttggacagtttctactgttttgtcatatctcttcccaccaacatgatggcatggaagcttatgtcaaagtagacagctgtccagaggaaccccaactacgaatgaaaaataatgaagaagcggaagactatgatgatgatcttactgattctgaaatggatgtggtcaggtttgatgatgacaactctccttcctttatccaaattcgctcagttgccaagaagcatcctaaaacttgggtacattacattgctgctgaagaggaggactgggactatgctcccttagtcctcgcccccgatgacagaagttataaaagtcaatatttgaacaatggccctcagcggattggtaggaagtacaaaaaagtccgatttatggcatacacagatgaaacctttaagactcgtgaagctattcagcatgaatcaggaatcttgggacctttactttatggggaagttggagacacactgttgattatatttaagaatcaagcaagcagaccatataacatctaccctcacggaatcactgatgtccgtcctttgtattcaaggagattaccaaaaggtgtaaaacatttgaaggattttccaattctgccaggagaaatattcaaatataaatggacagtgactgtagaagatgggccaactaaatcagatcctcggtgcctgacccgctattactctagtttcgttaatatggagagagatctagcttcaggactcattggccctctcctcatctgctacaaagaatctgtagatcaaagaggaaaccagataatgtcagacaagaggaatgtcatcctgttttctgtatttgatgagaaccgaagctggtacctcacagagaatatacaacgctttctccccaatccagctggagtgcagcttgaggatccagagttccaagcctccaacatcatgcacagcatcaatggctatgtttttgatagtttgcagttgtcagtttgtttgcatgaggtggcatactggtacattctaagcattggagcacagactgacttcctttctgtcttcttctctggatataccttcaaacacaaaatggtctatgaagacacactcaccctattcccattctcaggagaaactgtcttcatgtcgatggaaaacccaggtctatggattctggggtgccacaactcagactttcggaacagaggcatgaccgccttactgaaggtttctagttgtgacaagaacactggtgattattacgaggacagttatgaagatatttcagcatacttgctgagtaaaaacaatgccattgaaccaagaagcttctctcaaaacccaccagtcttgaaacgccatcaacgggaaataactcgtactactcttcagtcagatcaagaggaaatcgattatgatgataccatatcagttgaaatgaagaaggaagattttgacatttatgatgaggatgaaaatcagagcccccgcagctttcaaaagaaaacacgacactattttattgctgcagtggagaggctctgggattatgggatgagtagctccccacatgttctaagaaacagggctcagagtggcagtgtccctcagttcaagaaagttgttttccaggaatttactgatggctcctttactcagcccttataccgtggagaactaaatgaacatttgggactcctggggccatatataagagcagaagttgaagataatatcatggtaactttcagaaatcaggcctctcgtccctattccttctattctagccttatttcttatgaggaagatcagaggcaaggagcagaacctagaaaaaactttgtcaagcctaatgaaaccaaaacttacttttggaaagtgcaacatcatatggcacccactaaagatgagtttgactgcaaagcctgggcttatttctctgatgttgacctggaaaaagatgtgcactcaggcctgattggaccccttctggtctgccacactaacacactgaaccctgctcatgggagacaagtgacagtacaggaatttgctctgtttttcaccatctttgatgagaccaaaagctggtacttcactgaaaatatggaaagaaactgcaggggcgcgccaggttctcctgctggctcccccacctcaacagaagaggggacaagcgaaagcgctacgcctgagagtggccctggctctgagccagccacctccggctctgaaacccctgcctcgagcgctccctgcaatatccagatggaagatcccacttttaaagagaattatcgcttccatgcaatcaatggctacataatggatacactacctggcttagtaatggctcaggatcaaaggattcgatggtatctgctcagcatgggcagcaatgaaaacatccattctattcatttcagtggacatgtgttcactgtacgaaaaaaagaggagtataaaatggcactgtacaatctctatccaggtgtttttgagacagtggaaatgttaccatccaaagctggaatttggcgggtggaatgccttattggcgagcatctacatgctgggatgagcacactttttctggtgtacagcaataagtgtcagactcccctgggaatggcttctggacacattagagattttcagattacagcttcaggacaatatggacagtgggccccaaagctggccagacttcattattccggatcaatcaatgcctggagcaccaaggagcccttttcttggatcaaggtggatctgttggcaccaatgattattcacggcatcaagacccagggtgcccgtcagaagttctccagcctctacatctctcagtttatcatcatgtatagtcttgatgggaagaagtggcagacttatcgaggaaattccactggaaccttaatggtcttctttggcaatgtggattcatctgggataaaacacaatatttttaaccctccaattattgctcgatacatccgtttgcacccaactcattatagcattcgcagcactcttcgcatggagttgatgggctgtgatttaaatagttgcagcatgccattgggaatggagagtaaagcaatatcagatgcacagattactgcttcatcctactttaccaatatgtttgccacctggtctccttcaaaagctcgacttcacctccaagggaggagtaatgcctggagacctcaggtgaataatccaaaagagtggctgcaagtggacttccagaagacaatgaaagtcacaggagtaactactcagggagtaaaatctctgcttaccagcatgtatgtgaaggagttcctcatctccagcagtcaagatggccatcagtggactctcttttttcagaatggcaaagtaaaggtttttcagggaaatcaagactccttcacacctgtggtgaactctctagacccaccgttactgactcgctaccttcgaattcacccccagagttgggtgcaccagattgccctgaggatggaggttctgggctgcgaggcacaggacctctacggcgccggatcacctggggccgaaacggccgaacaaaaactcatctcagaagaggatctgtcacctgcaaccggttga

SEQ ID NO: 766 - protein, 1524 aa, Artificial Sequence
  Description of Artificial Sequence: Synthetic polypeptide
MQIELSTCFFLCLLRFCFSATRRYYLGAVELSWDYMQSDLGELPVDARFPPRVPKSFPFNTSVVYKKTLFVEFTDHLFNIAKPRPPWMGLLGPTIQAEVYDTVVITLKNMASHPVSLHAVGVSYWKASEGAEYDDQTSQREKEDDKVFPGGSHTYVWQVLKENGPMASDPLCLTYSYLSHVDLVKDLNSGLIGALLVCREGSLAKEKTQTLHKFILLFAVFDEGKSWHSETKNSLMQDRDAASARAWPKMHTVNGYVNRSLPGLIGCHRKSVYWHVIGMGTTPEVHSIFLEGHTFLVRNHRQASLEISPITFLTAQTLLMDLGQFLLFCHISSHQHDGMEAYVKVDSCPEEPQLRMKNNEEAEDYDDDLTDSEMDVVRFDDDNSPSFIQIRSVAKKHPKTWVHYIAAEEEDWDYAPLVLAPDDRSYKSQYLNNGPQRIGRKYKKVRFMAYTDETFKTREAIQHESGILGPLLYGEVGDTLLIIFKNQASRPYNIYPHGITDVRPLYSRRLPKGVKHLKDFPILPGEIFKYKWTVTVEDGPTKSDPRCLTRYYSSFVNMERDLASGLIGPLLICYKESVDQRGNQIMSDKRNVILFSVFDENRSWYLTENIQRFLPNPAGVQLEDPEFQASNIMHSINGYVFDSLQLSVCLHEVAYWYILSIGAQTDFLSVFFSGYTFKHKMVYEDTLTLFPFSGETVFMSMENPGLWILGCHNSDFRNRGMTALLKVSSCDKNTGDYYEDSYEDISAYLLSKNNAIEPRSFSQNPPVLKRHQREITRTTLQSDQEEIDYDDTISVEMKKEDFDIYDEDENQSPRSFQKKTRHYFIAAVERLWDYGMSSSPHVLRNRAQSGSVPQFKKVVFQEFTDGSFTQPLYRGELNEHLGLLGPYIRAEVEDNIMVTFRNQASRPYSFYSSLISYEEDQRQGAEPRKNFVKPNETKTYFWKVQHHMAPTKDEFDCKAWAYFSDVDLEKDVHSGLIGPLLVCHTNTLNPAHGRQVTVQEFALFFTIFDETKSWYFTENMERNCRAPCNGAPGSPAGSPTSTEEGTSESATPESGPGSEPATSGSETPASSIQMEDPTFKENYRFHAINGYIMDTLPGLVMAQDQRIRWYLLSMGSNENIHSIHFSGHVFTVRKKEEYKMALYNLYPGVFETVEMLPSKAGIWRVECLIGEHLHAGMSTLFLVYSNKCQTPLGMASGHIRDFQITASGQYGQWAPKLARLHYSGSINAWSTKEPFSWIKVDLLAPMIIHGIKTQGARQKFSSLYISQFIIMYSLDGKKWQTYRGNSTGTLMVFFGNVDSSGIKHNIFNPPIIARYIRLHPTHYSIRSTLRMELMGCDLNSCSMPLGMESKAISDAQITASSYFTNMFATWSPSKARLHLQGRSNAWRPQVNNPKEWLQVDFQKTMKVTGVTTQGVKSLLTSMYVKEFLISSSQDGHQWTLFFQNGKVKVFQGNQDSFTPVVNSLDPPLLTRYLRIHPQSWVHQIALRMEVLGCEAQDLYGAGSPGAETAEQKLISEEDLSPATG

SEQ ID NO: 767 - DNA, 4575 bp, Artificial Sequence
  Description of Artificial Sequence: Synthetic polynucleotide
atgcaaatagagctctccacctgcttctttctgtgccttttgcgattctgctttagtgccaccagaagatactacctgggtgcagtggaactgtcatgggactatatgcaaagtgatctcggtgagctgcctgtggacgcaagatttcctcctagagtgccaaaatcttttccattcaacacctcagtcgtgtacaaaaagactctgtttgtagaattcacggatcaccttttcaacatcgctaagccaaggccaccctggatgggtctgctaggtcctaccatccaggctgaggtttatgatacagtggtcattacacttaagaacatggcttcccatcctgtcagtcttcatgctgttggtgtatcctactggaaagcttctgagggagctgaatatgatgatcagaccagtcaaagggagaaagaagatgataaagtcttccctggtggaagccatacatatgtctggcaggtcctgaaagagaatggtccaatggcctctgacccactgtgccttacctactcatatctttctcatgtggacctggtaaaagacttgaattcaggcctcattggagccctactagtatgtagagaagggagtctggccaaggaaaagacacagaccttgcacaaatttatactactttttgctgtatttgatgaagggaaaagttggcactcagaaacaaagaactccttgatgcaggatagggatgctgcatctgctcgggcctggcctaaaatgcacacagtcaatggttatgtaaacaggtctctgccaggtctgattggatgccacaggaaatcagtctattggcatgtgattggaatgggcaccactcctgaagtgcactcaatattcctcgaaggtcacacatttcttgtgaggaaccatcgccaggctagcttggaaatctcgccaataactttccttactgctcaaacactcttgatggaccttggacagtttctactgttttgtcatatctcttcccaccaacatgatggcatggaagcttatgtcaaagtagacagctgtccagaggaaccccaactacgaatgaaaaataatgaagaagcggaagactatgatgatgatcttactgattctgaaatggatgtggtcaggtttgatgatgacaactctccttcctttatccaaattcgctcagttgccaagaagcatcctaaaacttgggtacattacattgctgctgaagaggaggactgggactatgctcccttagtcctcgcccccgatgacagaagttataaaagtcaatatttgaacaatggccctcagcggattggtaggaagtacaaaaaagtccgatttatggcatacacagatgaaacctttaagactcgtgaagctattcagcatgaatcaggaatcttgggacctttactttatggggaagttggagacacactgttgattatatttaagaatcaagcaagcagaccatataacatctaccctcacggaatcactgatgtccgtcctttgtattcaaggagattaccaaaaggtgtaaaacatttgaaggattttccaattctgccaggagaaatattcaaatataaatggacagtgactgtagaagatgggccaactaaatcagatcctcggtgcctgacccgctattactctagtttcgttaatatggagagagatctagcttcaggactcattggccctctcctcatctgctacaaagaatctgtagatcaaagaggaaaccagataatgtcagacaagaggaatgtcatcctgttttctgtatttgatgagaaccgaagctggtacctcacagagaatatacaacgctttctccccaatccagctggagtgcagcttgaggatccagagttccaagcctccaacatcatgcacagcatcaatggctatgtttttgatagtttgcagttgtcagtttgtttgcatgaggtggcatactggtacattctaagcattggagcacagactgacttcctttctgtcttcttctctggatataccttcaaacacaaaatggtctatgaagacacactcaccctattcccattctcaggagaaactgtcttcatgtcgatggaaaacccaggtctatggattctggggtgccacaactcagactttcggaacagaggcatgaccgccttactgaaggtttctagttgtgacaagaacactggtgattattacgaggacagttatgaagatatttcagcatacttgctgagtaaaaacaatgccattgaaccaagaagcttctctcaaaacccaccagtcttgaaacgccatcaacgggaaataactcgtactactcttcagtcagatcaagaggaaatcgattatgatgataccatatcagttgaaatgaagaaggaagattttgacatttatgatgaggatgaaaatcagagcccccgcagctttcaaaagaaaacacgacactattttattgctgcagtggagaggctctgggattatgggatgagtagctccccacatgttctaagaaacagggctcagagtggcagtgtccctcagttcaagaaagttgttttccaggaatttactgatggctcctttactcagcccttataccgtggagaactaaatgaacatttgggactcctggggccatatataagagcagaagttgaagataatatcatggtaactttcagaaatcaggcctctcgtccctattccttctattctagccttatttcttatgaggaagatcagaggcaaggagcagaacctagaaaaaactttgtcaagcctaatgaaaccaaaacttacttttggaaagtgcaacatcatatggcacccactaaagatgagtttgactgcaaagcctgggcttatttctctgatgttgacctggaaaaagatgtgcactcaggcctgattggaccccttctggtctgccacactaacacactgaaccctgctcatgggagacaagtgacagtacaggaatttgctctgtttttcaccatctttgatgagaccaaaagctggtacttcactgaaaatatggaaagaaactgcagggctccctgcaatggcgcgccaggttctcctgctggctcccccacctcaacagaagaggggacaagcgaaagcgctacgcctgagagtggccctggctctgagccagccacctccggctctgaaacccctgcctcgagcatccagatggaagatcccacttttaaagagaattatcgcttccatgcaatcaatggctacataatggatacactacctggcttagtaatggctcaggatcaaaggattcgatggtatctgctcagcatgggcagcaatgaaaacatccattctattcatttcagtggacatgtgttcactgtacgaaaaaaagaggagtataaaatggcactgtacaatctctatccaggtgtttttgagacagtggaaatgttaccatccaaagctggaatttggcgggtggaatgccttattggcgagcatctacatgctgggatgagcacactttttctggtgtacagcaataagtgtcagactcccctgggaatggcttctggacacattagagattttcagattacagcttcaggacaatatggacagtgggccccaaagctggccagacttcattattccggatcaatcaatgcctggagcaccaaggagcccttttcttggatcaaggtggatctgttggcaccaatgattattcacggcatcaagacccagggtgcccgtcagaagttctccagcctctacatctctcagtttatcatcatgtatagtcttgatgggaagaagtggcagacttatcgaggaaattccactggaaccttaatggtcttctttggcaatgtggattcatctgggataaaacacaatatttttaaccctccaattattgctcgatacatccgtttgcacccaactcattatagcattcgcagcactcttcgcatggagttgatgggctgtgatttaaatagttgcagcatgccattgggaatggagagtaaagcaatatcagatgcacagattactgcttcatcctactttaccaatatgtttgccacctggtctccttcaaaagctcgacttcacctccaagggaggagtaatgcctggagacctcaggtgaataatccaaaagagtggctgcaagtggacttccagaagacaatgaaagtcacaggagtaactactcagggagtaaaatctctgcttaccagcatgtatgtgaaggagttcctcatctccagcagtcaagatggccatcagtggactctcttttttcagaatggcaaagtaaaggtttttcagggaaatcaagactccttcacacctgtggtgaactctctagacccaccgttactgactcgctaccttcgaattcacccccagagttgggtgcaccagattgccctgaggatggaggttctgggctgcgaggcacaggacctctacggcgccggatcacctggggccgaaacggccgaacaaaaactcatctcagaagaggatctgtcacctgcaaccggttga

SEQ ID NO: 768 - protein, 1524 aa, Artificial Sequence
  Description of Artificial Sequence: Synthetic polypeptide
MQIELSTCFFLCLLRFCFSATRRYYLGAVELSWDYMQSDLGELPVDARFPPRVPKSFPFNTSVVYKKTLFVEFTDHLFNIAKPRPPWMGLLGPTIQAEVYDTVVITLKNMASHPVSLHAVGVSYWKASEGAEYDDQTSQREKEDDKVFPGGSHTYVWQVLKENGPMASDPLCLTYSYLSHVDLVKDLNSGLIGALLVCREGSLAKEKTQTLHKFILLFAVFDEGKSWHSETKNSLMQDRDAASARAWPKMHTVNGYVNRSLPGLIGCHRKSVYWHVIGMGTTPEVHSIFLEGHTFLVRNHRQASLEISPITFLTAQTLLMDLGQFLLFCHISSHQHDGMEAYVKVDSCPEEPQLRMKNNEEAEDYDDDLTDSEMDVVRFDDDNSPSFIQIRSVAKKHPKTWVHYIAAEEEDWDYAPLVLAPDDRSYKSQYLNNGPQRIGRKYKKVRFMAYTDETFKTREAIQHESGILGPLLYGEVGDTLLIIFKNQASRPYNIYPHGITDVRPLYSRRLPKGVKHLKDFPILPGEIFKYKWTVTVEDGPTKSDPRCLTRYYSSFVNMERDLASGLIGPLLICYKESVDQRGNQIMSDKRNVILFSVFDENRSWYLTENIQRFLPNPAGVQLEDPEFQASNIMHSINGYVFDSLQLSVCLHEVAYWYILSIGAQTDFLSVFFSGYTFKHKMVYEDTLTLFPFSGETVFMSMENPGLWILGCHNSDFRNRGMTALLKVSSCDKNTGDYYEDSYEDISAYLLSKNNAIEPRSFSQNPPVLKRHQREITRTTLQSDQEEIDYDDTISVEMKKEDFDIYDEDENQSPRSFQKKTRHYFIAAVERLWDYGMSSSPHVLRNRAQSGSVPQFKKVVFQEFTDGSFTQPLYRGELNEHLGLLGPYIRAEVEDNIMVTFRNQASRPYSFYSSLISYEEDQRQGAEPRKNFVKPNETKTYFWKVQHHMAPTKDEFDCKAWAYFSDVDLEKDVHSGLIGPLLVCHTNTLNPAHGRQVTVQEFALFFTIFDETKSWYFTENMERNCRAPCNIQMEDPTFKENYRFHAINGYIMDTLPGLVMAQDGAPGSPAGSPTSTEEGTSESATPESGPGSEPATSGSETPASSQRIRWYLLSMGSNENIHSIHFSGHVFTVRKKEEYKMALYNLYPGVFETVEMLPSKAGIWRVECLIGEHLHAGMSTLFLVYSNKCQTPLGMASGHIRDFQITASGQYGQWAPKLARLHYSGSINAWSTKEPFSWIKVDLLAPMIIHGIKTQGARQKFSSLYISQFIIMYSLDGKKWQTYRGNSTGTLMVFFGNVDSSGIKHNIFNPPIIARYIRLHPTHYSIRSTLRMELMGCDLNSCSMPLGMESKAISDAQITASSYFTNMFATWSPSKARLHLQGRSNAWRPQVNNPKEWLQVDFQKTMKVTGVTTQGVKSLLTSMYVKEFLISSSQDGHQWTLFFQNGKVKVFQGNQDSFTPVVNSLDPPLLTRYLRIHPQSWVHQIALRMEVLGCEAQDLYGAGSPGAETAEQKLISEEDLSPATG

SEQ ID NO: 769 - DNA, 4575 bp, Artificial Sequence
  Description of Artificial Sequence: Synthetic polynucleotide
atgcaaatagagctctccacctgcttctttctgtgccttttgcgattctgctttagtgccaccagaagatactacctgggtgcagtggaactgtcatgggactatatgcaaagtgatctcggtgagctgcctgtggacgcaagatttcctcctagagtgccaaaatcttttccattcaacacctcagtcgtgtacaaaaagactctgtttgtagaattcacggatcaccttttcaacatcgctaagccaaggccaccctggatgggtctgctaggtcctaccatccaggctgaggtttatgatacagtggtcattacacttaagaacatggcttcccatcctgtcagtcttcatgctgttggtgtatcctactggaaagcttctgagggagctgaatatgatgatcagaccagtcaaagggagaaagaagatgataaagtcttccctggtggaagccatacatatgtctggcaggtcctgaaagagaatggtccaatggcctctgacccactgtgccttacctactcatatctttctcatgtggacctggtaaaagacttgaattcaggcctcattggagccctactagtatgtagagaagggagtctggccaaggaaaagacacagaccttgcacaaatttatactactttttgctgtatttgatgaagggaaaagttggcactcagaaacaaagaactccttgatgcaggatagggatgctgcatctgctcgggcctggcctaaaatgcacacagtcaatggttatgtaaacaggtctctgccaggtctgattggatgccacaggaaatcagtctattggcatgtgattggaatgggcaccactcctgaagtgcactcaatattcctcgaaggtcacacatttcttgtgaggaaccatcgccaggctagcttggaaatctcgccaataactttccttactgctcaaacactcttgatggaccttggacagtttctactgttttgtcatatctcttcccaccaacatgatggcatggaagcttatgtcaaagtagacagctgtccagaggaaccccaactacgaatgaaaaataatgaagaagcggaagactatgatgatgatcttactgattctgaaatggatgtggtcaggtttgatgatgacaactctccttcctttatccaaattcgctcagttgccaagaagcatcctaaaacttgggtacattacattgctgctgaagaggaggactgggactatgctcccttagtcctcgcccccgatgacagaagttataaaagtcaatatttgaacaatggccctcagcggattggtaggaagtacaaaaaagtccgatttatggcatacacagatgaaacctttaagactcgtgaagctattcagcatgaatcaggaatcttgggacctttactttatggggaagttggagacacactgttgattatatttaagaatcaagcaagcagaccatataacatctaccctcacggaatcactgatgtccgtcctttgtattcaaggagattaccaaaaggtgtaaaacatttgaaggattttccaattctgccaggagaaatattcaaatataaatggacagtgactgtagaagatgggccaactaaatcagatcctcggtgcctgacccgctattactctagtttcgttaatatggagagagatctagcttcaggactcattggccctctcctcatctgctacaaagaatctgtagatcaaagaggaaaccagataatgtcagacaagaggaatgtcatcctgttttctgtatttgatgagaaccgaagctggtacctcacagagaatatacaacgctttctccccaatccagctggagtgcagcttgaggatccagagttccaagcctccaacatcatgcacagcatcaatggctatgtttttgatagtttgcagttgtcagtttgtttgcatgaggtggcatactggtacattctaagcattggagcacagactgacttcctttctgtcttcttctctggatataccttcaaacacaaaatggtctatgaagacacactcaccctattcccattctcaggagaaactgtcttcatgtcgatggaaaacccaggtctatggattctggggtgccacaactcagactttcggaacagaggcatgaccgccttactgaaggtttctagttgtgacaagaacactggtgattattacgaggacagttatgaagatatttcagcatacttgctgagtaaaaacaatgccattgaaccaagaagcttctctcaaaacccaccagtcttgaaacgccatcaacgggaaataactcgtactactcttcagtcagatcaagaggaaatcgattatgatgataccatatcagttgaaatgaagaaggaagattttgacatttatgatgaggatgaaaatcagagcccccgcagctttcaaaagaaaacacgacactattttattgctgcagtggagaggctctgggattatgggatgagtagctccccacatgttctaagaaacagggctcagagtggcagtgtccctcagttcaagaaagttgttttccaggaatttactgatggctcctttactcagcccttataccgtggagaactaaatgaacatttgggactcctggggccatatataagagcagaagttgaagataatatcatggtaactttcagaaatcaggcctctcgtccctattccttctattctagccttatttcttatgaggaagatcagaggcaaggagcagaacctagaaaaaactttgtcaagcctaatgaaaccaaaacttacttttggaaagtgcaacatcatatggcacccactaaagatgagtttgactgcaaagcctgggcttatttctctgatgttgacctggaaaaagatgtgcactcaggcctgattggaccccttctggtctgccacactaacacactgaaccctgctcatgggagacaagtgacagtacaggaatttgctctgtttttcaccatctttgatgagaccaaaagctggtacttcactgaaaatatggaaagaaactgcagggctccctgcaatatccagatggaagatcccacttttaaagagaattatcgcttccatgcaatcaatggctacataatggatacactacctggcttagtaatggctcaggatggcgcgccaggttctcctgctggctcccccacctcaacagaagaggggacaagcgaaagcgctacgcctgagagtggccctggctctgagccagccacctccggctctgaaacccctgcctcgagccaaaggattcgatggtatctgctcagcatgggcagcaatgaaaacatccattctattcatttcagtggacatgtgttcactgtacgaaaaaaagaggagtataaaatggcactgtacaatctctatccaggtgtttttgagacagtggaaatgttaccatccaaagctggaatttggcgggtggaatgccttattggcgagcatctacatgctgggatgagcacactttttctggtgtacagcaataagtgtcagactcccctgggaatggcttctggacacattagagattttcagattacagcttcaggacaatatggacagtgggccccaaagctggccagacttcattattccggatcaatcaatgcctggagcaccaaggagcccttttcttggatcaaggtggatctgttggcaccaatgattattcacggcatcaagacccagggtgcccgtcagaagttctccagcctctacatctctcagtttatcatcatgtatagtcttgatgggaagaagtggcagacttatcgaggaaattccactggaaccttaatggtcttctttggcaatgtggattcatctgggataaaacacaatatttttaaccctccaattattgctcgatacatccgtttgcacccaactcattatagcattcgcagcactcttcgcatggagttgatgggctgtgatttaaatagttgcagcatgccattgggaatggagagtaaagcaatatcagatgcacagattactgcttcatcctactttaccaatatgtttgccacctggtctccttcaaaagctcgacttcacctccaagggaggagtaatgcctggagacctcaggtgaataatccaaaagagtggctgcaagtggacttccagaagacaatgaaagtcacaggagtaactactcagggagtaaaatctctgcttaccagcatgtatgtgaaggagttcctcatctccagcagtcaagatggccatcagtggactctcttttttcagaatggcaaagtaaaggtttttcagggaaatcaagactccttcacacctgtggtgaactctctagacccaccgttactgactcgctaccttcgaattcacccccagagttgggtgcaccagattgccctgaggatggaggttctgggctgcgaggcacaggacctctacggcgccggatcacctggggccgaaacggccgaacaaaaactcatctcagaagaggatctgtcacctgcaaccggttga

SEQ ID NO: 770 - protein, 1524 aa, Artificial Sequence
  Description of Artificial Sequence: Synthetic polypeptide
MQIELSTCFFLCLLRFCFSATRRYYLGAVELSWDYMQSDLGELPVDARFPPRVPKSFPFNTSVVYKKTLFVEFTDHLFNIAKPRPPWMGLLGPTIQAEVYDTVVITLKNMASHPVSLHAVGVSYWKASEGAEYDDQTSQREKEDDKVFPGGSHTYVWQVLKENGPMASDPLCLTYSYLSHVDLVKDLNSGLIGALLVCREGSLAKEKTQTLHKFILLFAVFDEGKSWHSETKNSLMQDRDAASARAWPKMHTVNGYVNRSLPGLIGCHRKSVYWHVIGMGTTPEVHSIFLEGHTFLVRNHRQASLEISPITFLTAQTLLMDLGQFLLFCHISSHQHDGMEAYVKVDSCPEEPQLRMKNNEEAEDYDDDLTDSEMDVVRFDDDNSPSFIQIRSVAKKHPKTWVHYIAAEEEDWDYAPLVLAPDDRSYKSQYLNNGPQRIGRKYKKVRFMAYTDETFKTREAIQHESGILGPLLYGEVGDTLLIIFKNQASRPYNIYPHGITDVRPLYSRRLPKGVKHLKDFPILPGEIFKYKWTVTVEDGPTKSDPRCLTRYYSSFVNMERDLASGLIGPLLICYKESVDQRGNQIMSDKRNVILFSVFDENRSWYLTENIQRFLPNPAGVQLEDPEFQASNIMHSINGYVFDSLQLSVCLHEVAYWYILSIGAQTDFLSVFFSGYTFKHKMVYEDTLTLFPFSGETVFMSMENPGLWILGCHNSDFRNRGMTALLKVSSCDKNTGDYYEDSYEDISAYLLSKNNAIEPRSFSQNPPVLKRHQREITRTTLQSDQEEIDYDDTISVEMKKEDFDIYDEDENQSPRSFQKKTRHYFIAAVERLWDYGMSSSPHVLRNRAQSGSVPQFKKVVFQEFTDGSFTQPLYRGELNEHLGLLGPYIRAEVEDNIMVTFRNQASRPYSFYSSLISYEEDQRQGAEPRKNFVKPNETKTYFWKVQHHMAPTKDEFDCKAWAYFSDVDLEKDVHSGLIGPLLVCHTNTLNPAHGRQVTVQEFALFFTIFDETKSWYFTENMERNCRAPCNIQMEDPTFKENYRFHAINGYIMDTLPGLVMAQDQRIRWYLLSMGSNENIHSIHFSGHVFTVRKKEEYKMALYNLYPGVFETVEMLPSKAGIWRVECLIGEHLHAGMSTLFLVYSNGAPGSPAGSPTSTEEGTSESATPESGPGSEPATSGSETPASSKCQTPLGMASGHIRDFQITASGQYGQWAPKLARLHYSGSINAWSTKEPFSWIKVDLLAPMIIHGIKTQGARQKFSSLYISQFIIMYSLDGKKWQTYRGNSTGTLMVFFGNVDSSGIKHNIFNPPIIARYIRLHPTHYSIRSTLRMELMGCDLNSCSMPLGMESKAISDAQITASSYFTNMFATWSPSKARLHLQGRSNAWRPQVNNPKEWLQVDFQKTMKVTGVTTQGVKSLLTSMYVKEFLISSSQDGHQWTLFFQNGKVKVFQGNQDSFTPVVNSLDPPLLTRYLRIHPQSWVHQIALRMEVLGCEAQDLYGAGSPGAETAEQKLISEEDLSPATG

SEQ ID NO: 771 - DNA, 4575 bp, Artificial Sequence
  Description of Artificial Sequence: Synthetic polynucleotide
atgcaaatagagctctccacctgcttctttctgtgccttttgcgattctgctttagtgccaccagaagatactacctgggtgcagtggaactgtcatgggactatatgcaaagtgatctcggtgagctgcctgtggacgcaagatttcctcctagagtgccaaaatcttttccattcaacacctcagtcgtgtacaaaaagactctgtttgtagaattcacggatcaccttttcaacatcgctaagccaaggccaccctggatgggtctgctaggtcctaccatccaggctgaggtttatgatacagtggtcattacacttaagaacatggcttcccatcctgtcagtcttcatgctgttggtgtatcctactggaaagcttctgagggagctgaatatgatgatcagaccagtcaaagggagaaagaagatgataaagtcttccctggtggaagccatacatatgtctggcaggtcctgaaagagaatggtccaatggcctctgacccactgtgccttacctactcatatctttctcatgtggacctggtaaaagacttgaattcaggcctcattggagccctactagtatgtagagaagggagtctggccaaggaaaagacacagaccttgcacaaatttatactactttttgctgtatttgatgaagggaaaagttggcactcagaaacaaagaactccttgatgcaggatagggatgctgcatctgctcgggcctggcctaaaatgcacacagtcaatggttatgtaaacaggtctctgccaggtctgattggatgccacaggaaatcagtctattggcatgtgattggaatgggcaccactcctgaagtgcactcaatattcctcgaaggtcacacatttcttgtgaggaaccatcgccaggctagcttggaaatctcgccaataactttccttactgctcaaacactcttgatggaccttggacagtttctactgttttgtcatatctcttcccaccaacatgatggcatggaagcttatgtcaaagtagacagctgtccagaggaaccccaactacgaatgaaaaataatgaagaagcggaagactatgatgatgatcttactgattctgaaatggatgtggtcaggtttgatgatgacaactctccttcctttatccaaattcgctcagttgccaagaagcatcctaaaacttgggtacattacattgctgctgaagaggaggactgggactatgctcccttagtcctcgcccccgatgacagaagttataaaagtcaatatttgaacaatggccctcagcggattggtaggaagtacaaaaaagtccgatttatggcatacacagatgaaacctttaagactcgtgaagctattcagcatgaatcaggaatcttgggacctttactttatggggaagttggagacacactgttgattatatttaagaatcaagcaagcagaccatataacatctaccctcacggaatcactgatgtccgtcctttgtattcaaggagattaccaaaaggtgtaaaacatttgaaggattttccaattctgccaggagaaatattcaaatataaatggacagtgactgtagaagatgggccaactaaatcagatcctcggtgcctgacccgctattactctagtttcgttaatatggagagagatctagcttcaggactcattggccctctcctcatctgctacaaagaatctgtagatcaaagaggaaaccagataatgtcagacaagaggaatgtcatcctgttttctgtatttgatgagaaccgaagctggtacctcacagagaatatacaacgctttctccccaatccagctggagtgcagcttgaggatccagagttccaagcctccaacatcatgcacagcatcaatggctatgtttttgatagtttgcagttgtcagtttgtttgcatgaggtggcatactggtacattctaagcattggagcacagactgacttcctttctgtcttcttctctggatataccttcaaacacaaaatggtctatgaagacacactcaccctattcccattctcaggagaaactgtcttcatgtcgatggaaaacccaggtctatggattctggggtgccacaactcagactttcggaacagaggcatgaccgccttactgaaggtttctagttgtgacaagaacactggtgattattacgaggacagttatgaagatatttcagcatacttgctgagtaaaaacaatgccattgaaccaagaagcttctctcaaaacccaccagtcttgaaacgccatcaacgggaaataactcgtactactcttcagtcagatcaagaggaaatcgattatgatgataccatatcagttgaaatgaagaaggaagattttgacatttatgatgaggatgaaaatcagagcccccgcagctttcaaaagaaaacacgacactattttattgctgcagtggagaggctctgggattatgggatgagtagctccccacatgttctaagaaacagggctcagagtggcagtgtccctcagttcaagaaagttgttttccaggaatttactgatggctcctttactcagcccttataccgtggagaactaaatgaacatttgggactcctggggccatatataagagcagaagttgaagataatatcatggtaactttcagaaatcaggcctctcgtccctattccttctattctagccttatttcttatgaggaagatcagaggcaaggagcagaacctagaaaaaactttgtcaagcctaatgaaaccaaaacttacttttggaaagtgcaacatcatatggcacccactaaagatgagtttgactgcaaagcctgggcttatttctctgatgttgacctggaaaaagatgtgcactcaggcctgattggaccccttctggtctgccacactaacacactgaaccctgctcatgggagacaagtgacagtacaggaatttgctctgtttttcaccatctttgatgagaccaaaagctggtacttcactgaaaatatggaaagaaactgcagggctccctgcaatatccagatggaagatcccacttttaaagagaattatcgcttccatgcaatcaatggctacataatggatacactacctggcttagtaatggctcaggatcaaaggattcgatggtatctgctcagcatgggcagcaatgaaaacatccattctattcatttcagtggacatgtgttcactgtacgaaaaaaagaggagtataaaatggcactgtacaatctctatccaggtgtttttgagacagtggaaatgttaccatccaaagctggaatttggcgggtggaatgccttattggcgagcatctacatgctgggatgagcacactttttctggtgtacagcaatggcgcgccaggttctcctgctggctcccccacctcaacagaagaggggacaagcgaaagcgctacgcctgagagtggccctggctctgagccagccacctccggctctgaaacccctgcctcgagcaagtgtcagactcccctgggaatggcttctggacacattagagattttcagattacagcttcaggacaatatggacagtgggccccaaagctggccagacttcattattccggatcaatcaatgcctggagcaccaaggagcccttttcttggatcaaggtggatctgttggcaccaatgattattcacggcatcaagacccagggtgcccgtcagaagttctccagcctctacatctctcagtttatcatcatgtatagtcttgatgggaagaagtggcagacttatcgaggaaattccactggaaccttaatggtcttctttggcaatgtggattcatctgggataaaacacaatatttttaaccctccaattattgctcgatacatccgtttgcacccaactcattatagcattcgcagcactcttcgcatggagttgatgggctgtgatttaaatagttgcagcatgccattgggaatggagagtaaagcaatatcagatgcacagattactgcttcatcctactttaccaatatgtttgccacctggtctccttcaaaagctcgacttcacctccaagggaggagtaatgcctggagacctcaggtgaataatccaaaagagtggctgcaagtggacttccagaagacaatgaaagtcacaggagtaactactcagggagtaaaatctctgcttaccagcatgtatgtgaaggagttcctcatctccagcagtcaagatggccatcagtggactctcttttttcagaatggcaaagtaaaggtttttcagggaaatcaagactccttcacacctgtggtgaactctctagacccaccgttactgactcgctaccttcgaattcacccccagagttgggtgcaccagattgccctgaggatggaggttctgggctgcgaggcacaggacctctacggcgccggatcacctggggccgaaacggccgaacaaaaactcatctcagaagaggatctgtcacctgcaaccggttga

SEQ ID NO: 772 - protein, 1524 aa, Artificial Sequence
  Description of Artificial Sequence: Synthetic polypeptide
MQIELSTCFFLCLLRFCFSATRRYYLGAVELSWDYMQSDLGELPVDARFPPRVPKSFPFNTSVVYKKTLFVEFTDHLFNIAKPRPPWMGLLGPTIQAEVYDTVVITLKNMASHPVSLHAVGVSYWKASEGAEYDDQTSQREKEDDKVFPGGSHTYVWQVLKENGPMASDPLCLTYSYLSHVDLVKDLNSGLIGALLVCREGSLAKEKTQTLHKFILLFAVFDEGKSWHSETKNSLMQDRDAASARAWPKMHTVNGYVNRSLPGLIGCHRKSVYWHVIGMGTTPEVHSIFLEGHTFLVRNHRQASLEISPITFLTAQTLLMDLGQFLLFCHISSHQHDGMEAYVKVDSCPEEPQLRMKNNEEAEDYDDDLTDSEMDVVRFDDDNSPSFIQIRSVAKKHPKTWVHYIAAEEEDWDYAPLVLAPDDRSYKSQYLNNGPQRIGRKYKKVRFMAYTDETFKTREAIQHESGILGPLLYGEVGDTLLIIFKNQASRPYNIYPHGITDVRPLYSRRLPKGVKHLKDFPILPGEIFKYKWTVTVEDGPTKSDPRCLTRYYSSFVNMERDLASGLIGPLLICYKESVDQRGNQIMSDKRNVILFSVFDENRSWYLTENIQRFLPNPAGVQLEDPEFQASNIMHSINGYVFDSLQLSVCLHEVAYWYILSIGAQTDFLSVFFSGYTFKHKMVYEDTLTLFPFSGETVFMSMENPGLWILGCHNSDFRNRGMTALLKVSSCDKNTGDYYEDSYEDISAYLLSKNNAIEPRSFSQNPPVLKRHQREITRTTLQSDQEEIDYDDTISVEMKKEDFDIYDEDENQSPRSFQKKTRHYFIAAVERLWDYGMSSSPHVLRNRAQSGSVPQFKKVVFQEFTDGSFTQPLYRGELNEHLGLLGPYIRAEVEDNIMVTFRNQASRPYSFYSSLISYEEDQRQGAEPRKNFVKPNETKTYFWKVQHHMAPTKDEFDCKAWAYFSDVDLEKDVHSGLIGPLLVCHTNTLNPAHGRQVTVQEFALFFTIFDETKSWYFTENMERNCRAPCNIQMEDPTFKENYRFHAINGYIMDTLPGLVMAQDQRIRWYLLSMGSNENIHSIHFSGHVFTVRKKEEYKMALYNLYPGVFETVEMLPSKAGIWRVECLIGEHLHAGMSTLFLVYSNKCQTPLGMASGHIRDFQITASGQYGQWAPKLARLHYSGSINAWSTKEPFGAPGSPAGSPTSTEEGTSESATPESGPGSEPATSGSETPASSSWIKVDLLAPMIIHGIKTQGARQKFSSLYISQFIIMYSLDGKKWQTYRGNSTGTLMVFFGNVDSSGIKHNIFNPPIIARYIRLHPTHYSIRSTLRMELMGCDLNSCSMPLGMESKAISDAQITASSYFTNMFATWSPSKARLHLQGRSNAWRPQVNNPKEWLQVDFQKTMKVTGVTTQGVKSLLTSMYVKEFLISSSQDGHQWTLFFQNGKVKVFQGNQDSFTPVVNSLDPPLLTRYLRIHPQSWVHQIALRMEVLGCEAQDLYGAGSPGAETAEQKLISEEDLSPATG

SEQ ID NO: 773 - DNA, 4575 bp, Artificial Sequence
  Description of Artificial Sequence: Synthetic polynucleotide
atgcaaatagagctctccacctgcttctttctgtgccttttgcgattctgctttagtgccaccagaagatactacctgggtgcagtggaactgtcatgggactatatgcaaagtgatctcggtgagctgcctgtggacgcaagatttcctcctagagtgccaaaatcttttccattcaacacctcagtcgtgtacaaaaagactctgtttgtagaattcacggatcaccttttcaacatcgctaagccaaggccaccctggatgggtctgctaggtcctaccatccaggctgaggtttatgatacagtggtcattacacttaagaacatggcttcccatcctgtcagtcttcatgctgttggtgtatcctactggaaagcttctgagggagctgaatatgatgatcagaccagtcaaagggagaaagaagatgataaagtcttccctggtggaagccatacatatgtctggcaggtcctgaaagagaatggtccaatggcctctgacccactgtgccttacctactcatatctttctcatgtggacctggtaaaagacttgaattcaggcctcattggagccctactagtatgtagagaagggagtctggccaaggaaaagacacagaccttgcacaaatttatactactttttgctgtatttgatgaagggaaaagttggcactcagaaacaaagaactccttgatgcaggatagggatgctgcatctgctcgggcctggcctaaaatgcacacagtcaatggttatgtaaacaggtctctgccaggtctgattggatgccacaggaaatcagtctattggcatgtgattggaatgggcaccactcctgaagtgcactcaatattcctcgaaggtcacacatttcttgtgaggaaccatcgccaggctagcttggaaatctcgccaataactttccttactgctcaaacactcttgatggaccttggacagtttctactgttttgtcatatctcttcccaccaacatgatggcatggaagcttatgtcaaagtagacagctgtccagaggaaccccaactacgaatgaaaaataatgaagaagcggaagactatgatgatgatcttactgattctgaaatggatgtggtcaggtttgatgatgacaactctccttcctttatccaaattcgctcagttgccaagaagcatcctaaaacttgggtacattacattgctgctgaagaggaggactgggactatgctcccttagtcctcgcccccgatgacagaagttataaaagtcaatatttgaacaatggccctcagcggattggtaggaagtacaaaaaagtccgatttatggcatacacagatgaaacctttaagactcgtgaagctattcagcatgaatcaggaatcttgggacctttactttatggggaagttggagacacactgttgattatatttaagaatcaagcaagcagaccatataacatctaccctcacggaatcactgatgtccgtcctttgtattcaaggagattaccaaaaggtgtaaaacatttgaaggattttccaattctgccaggagaaatattcaaatataaatggacagtgactgtagaagatgggccaactaaatcagatcctcggtgcctgacccgctattactctagtttcgttaatatggagagagatctagcttcaggactcattggccctctcctcatctgctacaaagaatctgtagatcaaagaggaaaccagataatgtcagacaagaggaatgtcatcctgttttctgtatttgatgagaaccgaagctggtacctcacagagaatatacaacgctttctccccaatccagctggagtgcagcttgaggatccagagttccaagcctccaacatcatgcacagcatcaatggctatgtttttgatagtttgcagttgtcagtttgtttgcatgaggtggcatactggtacattctaagcattggagcacagactgacttcctttctgtcttcttctctggatataccttcaaacacaaaatggtctatgaagacacactcaccctattcccattctcaggagaaactgtcttcatgtcgatggaaaacccaggtctatggattctggggtgccacaactcagactttcggaacagaggcatgaccgccttactgaaggtttctagttgtgacaagaacactggtgattattacgaggacagttatgaagatatttcagcatacttgctgagtaaaaacaatgccattgaaccaagaagcttctctcaaaacccaccagtcttgaaacgccatcaacgggaaataactcgtactactcttcagtcagatcaagaggaaatcgattatgatgataccatatcagttgaaatgaagaaggaagattttgacatttatgatgaggatgaaaatcagagcccccgcagctttcaaaagaaaacacgacactattttattgctgcagtggagaggctctgggattatgggatgagtagctccccacatgttctaagaaacagggctcagagtggcagtgtccctcagttcaagaaagttgttttccaggaatttactgatggctcctttactcagcccttataccgtggagaactaaatgaacatttgggactcctggggccatatataagagcagaagttgaagataatatcatggtaactttcagaaatcaggcctctcgtccctattccttctattctagccttatttcttatgaggaagatcagaggcaaggagcagaacctagaaaaaactttgtcaagcctaatgaaaccaaaacttacttttggaaagtgcaacatcatatggcacccactaaagatgagtttgactgcaaagcctgggcttatttctctgatgttgacctggaaaaagatgtgcactcaggcctgattggaccccttctggtctgccacactaacacactgaaccctgctcatgggagacaagtgacagtacaggaatttgctctgtttttcaccatctttgatgagaccaaaagctggtacttcactgaaaatatggaaagaaactgcagggctccctgcaatatccagatggaagatcccacttttaaagagaattatcgcttccatgcaatcaatggctacataatggatacactacctggcttagtaatggctcaggatcaaaggattcgatggtatctgctcagcatgggcagcaatgaaaacatccattctattcatttcagtggacatgtgttcactgtacgaaaaaaagaggagtataaaatggcactgtacaatctctatccaggtgtttttgagacagtggaaatgttaccatccaaagctggaatttggcgggtggaatgccttattggcgagcatctacatgctgggatgagcacactttttctggtgtacagcaataagtgtcagactcccctgggaatggcttctggacacattagagattttcagattacagcttcaggacaatatggacagtgggccccaaagctggccagacttcattattccggatcaatcaatgcctggagcaccaaggagccctttggcgcgccaggttctcctgctggctcccccacctcaacagaagaggggacaagcgaaagcgctacgcctgagagtggccctggctctgagccagccacctccggctctgaaacccctgcctcgagctcttggatcaaggtggatctgttggcaccaatgattattcacggcatcaagacccagggtgcccgtcagaagttctccagcctctacatctctcagtttatcatcatgtatagtcttgatgggaagaagtggcagacttatcgaggaaattccactggaaccttaatggtcttctttggcaatgtggattcatctgggataaaacacaatatttttaaccctccaattattgctcgatacatccgtttgcacccaactcattatagcattcgcagcactcttcgcatggagttgatgggctgtgatttaaatagttgcagcatgccattgggaatggagagtaaagcaatatcagatgcacagattactgcttcatcctactttaccaatatgtttgccacctggtctccttcaaaagctcgacttcacctccaagggaggagtaatgcctggagacctcaggtgaataatccaaaagagtggctgcaagtggacttccagaagacaatgaaagtcacaggagtaactactcagggagtaaaatctctgcttaccagcatgtatgtgaaggagttcctcatctccagcagtcaagatggccatcagtggactctcttttttcagaatggcaaagtaaaggtttttcagggaaatcaagactccttcacacctgtggtgaactctctagacccaccgttactgactcgctaccttcgaattcacccccagagttgggtgcaccagattgccctgaggatggaggttctgggctgcgaggcacaggacctctacggcgccggatcacctggggccgaaacggccgaacaaaaactcatctcagaagaggatctgtcacctgcaaccggttga

SEQ ID NO: 774 - protein, 5 aa, Artificial Sequence
  Description of Unknown: B-domain-deleted Factor VIII B1 remnant peptide
SFSQN

SEQ ID NO: 775 - DNA, 4398 bp, Artificial Sequence
  Description of Artificial Sequence: Synthetic polynucleotide
atgcaaatagagctctccacctgcttctttctgtgccttttgcgattctgctttagtgccaccagaagatactacctgggtgcagtggaactgtcatgggactatatgcaaagtgatctcggtgagctgcctgtggacgcaagatttcctcctagagtgccaaaatcttttccattcaacacctcagtcgtgtacaaaaagactctgtttgtagaattcacggttcaccttttcaacatcgctaagccaaggccaccctggatgggtctgctaggtcctaccatccaggctgaggtttatgatacagtggtcattacacttaagaacatggcttcccatcctgtcagccttcatgctgttggtgtatcctactggaaagcgtctgagggagctgaatatgatgatcagaccagtcaaagggagaaagaagatgataaagttttccctggtggaagccatacatatgtctggcaggtcctgaaagagaatggtccaatggcctctgacccactgtgccttacctactcatatctttctcatgtggacctggtaaaagacttgaattcaggcctcattggagccctactagtatgtagagaagggagtctggccaaggaaaagacacagaccttgcacaaatttatactactttttgctgtatttgatgaagggaaaagttggcactcagaaacaaagaactccttgatgcaggatagggatgctgcatctgctcgggcctggcctaaaatgcacacagtcaatggttatgtaaacagttctctgccaggtctgattggatgccacaggaaatcagtctattggcatgtgattggaatgggcaccactcctgaagtgcactcaatattcctcgaaggtcacacatttcttgtgaggaaccatcgccaggcgtccttggaaatctcgccaataactttccttactgctcaaacactcttgatggaccttggacagtttctactgttttgtcatatctcttcccaccaacatgatggcatggaagcctatgtcaaagtagacagctgtccagaggaaccccaactacgaatgaaaaataatgaagaagcggaagattatgatgatgatcttactgattctgaaatggatgtggtcaggtttgatgatgacaactctccttcctttatccaaattcgctcagttgccaagaagcatcctaaaacttgggtacattacattgctgctgaagaggaggactgggactatgctcccttagtcctcgcccccgatgacagaagttataaaagtcaatatttgaacaatggccctcagcggattggtaggaagtacaaaaaagtccgatttatggcatacacagatgaaacctttaagactcgtgaagctattcagcatgaatcaggaatcttgggacctttactttatggggaagttggagacacactgttgattatatttaagaatcaagcaagcagaccatataacatctaccctcacggaatcactgatgtccgtcctttgtattcaaggagattaccaaaaggtgtaaaacatttgaaggattttccaattctgccaggagaaatattcaaatataaatggacagtgactgtagaagatgggccaactaaatcagatcctcggtgcctgacccgctattactctagtttcgttaatatggagagagatctagcttcaggactcattggccctctcctcatctgctacaaagaatctgtagatcaaagaggaaaccagataatgtcagacaagaggaatgtcatcctgttttctgtatttgatgagaaccgaagctggtacctcacagagaatatacaacgctttctccccaatccagctggagtgcagcttgaggatccagagttccaagcctccaacatcatgcacagcatcaatggctatgtttttgatagtttgcagttgtcagtttgtttgcatgaggtggcatactggtacattctaagcattggagcacagactgacttcctttctgtgttcttctctggatataccttcaaacacaaaatggtctatgaagatacactcaccctattcccattctcaggagaaactgtgttcatgtcgatggaaaacccaggtctatggattctggggtgccacaactcagactttcggaacagaggcatgaccgccttactgaaggtttctagttgtgacaagaacactggtgattattacgaggacagttatgaagatatttcagcatacttgctgagtaaaaacaatgccattgaaccaagaagcttctcccagaatgggtctcccgcgccagggtctcccccaccagtcttgaaacgccatcaacgggaaataactcgtactactcttcagtcagatcaagaggaaattgactatgatgataccatatcagttgaaatgaagaaggaagattttgacatttatgatgaggatgaaaatcagagcccccgcagctttcaaaagaaaacacgacactattttattgctgcagtggagaggctctgggattatgggatgagtagctccccacatgttctaagaaacagggctcagagtggcagtgtccctcagttcaagaaagttgttttccaggaatttactgatggctcctttactcagcccttataccgtggagaactaaatgaacatttgggactcctggggccatatataagagcagaagttgaagataatatcatggtaactttcagaaatcaggcctctcgtccctattccttctattctagccttatttcttatgaggaagatcagaggcaaggagcagaacctagaaaaaactttgtcaagcctaatgaaaccaaaacttacttttggaaagtgcaacatcatatggcacccactaaagatgagtttgactgcaaagcctgggcttatttctctgatgttgacctggaaaaagatgtgcactcaggcctgattggaccccttctggtctgccacactaacacactgaaccctgctcatgggagacaagtgacagtacaggaatttgctctgtttttcaccatctttgatgaaaccaaaagctggtacttcactgaaaatatggaaagaaactgcagggctccctgcaatatccagatggaagatcccacttttaaagagaattatcgcttccatgcaatcaatggctacataatggatacactacctggcttagtaatggctcaggatcaaaggattcgatggtatctgctcagcatgggcagcaatgaaaacatccattctattcatttcagtggacatgtgttcactgtacgaaaaaaagaggagtataaaatggcactgtacaatctctatccaggtgtttttgagacagtggaaatgttaccatccaaagctggaatttggcgggtggaatgccttattggcgagcatctacatgctgggatgagcacactttttctggtgtacagcaataagtgtcagactcccctgggaatggcttctggacacattagagattttcagattacagcttcaggacaatatggacagtgggccccaaagctggccagacttcattattccggatcaatcaatgcctggagcaccaaggagcccttttcttggatcaaggtggatctgttggcaccaatgattattcacggcatcaagacccagggtgcccgtcagaagttctccagcctctacatctctcagtttatcatcatgtatagtcttgatgggaagaagtggcagacttatcgaggaaattccactggaaccttaatggttttctttggcaatgtggattcatctgggataaaacacaatatttttaaccctccaattattgctcgatacatccgtttgcacccaactcattatagcattcgcagcactcttcgcatggagttgatgggctgtgatttaaatagttgcagcatgccattgggaatggagagtaaagcaatatcagatgcacagattactgcttcatcctactttaccaatatgtttgccacctggactccttcaaaagctcgacttcacctccaagggaggagtaatgcctggcgacctcaggtgaataatccaaaagagtggctgcaagtggacttccagaaaacaatgaaagtcacaggagtaactactcagggagtaaaatctctgcttaccagcatgtatgtgaaggagttcctcatctccagcagtcaagatggccatcagtggactctcttttttcagaatggcaaagtaaaggtttttcagggaaatcaagactccttcacacctgtggtgaactctctagacccaccgttactgactcgctaccttcgaattcacccccagagttgggtgcaccagattgccctgaggatggaggttctgggctgcgaggcacaggacctctactga

SEQ ID NO: 776 - protein, 1749 aa, Artificial Sequence
  Description of Artificial Sequence: Synthetic polypeptide
MQIELSTCFFLCLLRFCFSATRRYYLGAVELSWDYMQSDLGELPVDARFPPRVPKSFPFNTSVVYKKTLFVEFTVHLFNIAKPRPPWMGLLGPTIQAEVYDTVVITLKNMASHPVSLHAVGVSYWKASEGAEYDDQTSQREKEDDKVFPGGSHTYVWQVLKENGPMASDPLCLTYSYLSHVDLVKDLNSGLIGALLVCREGSLAKEKTQTLHKFILLFAVFDEGKSWHSETKNSLMQDRDAASARAWPKMHTVNGYVNSSLPGLIGCHRKSVYWHVIGMGTTPEVHSIFLEGHTFLVRNHRQASLEISPITFLTAQTLLMDLGQFLLFCHISSHQHDGMEAYVKVDSCPEEPQLRMKNNEEAEDYDDDLTDSEMDVVRFDDDNSPSFIQIRSVAKKHPKTWVHYIAAEEEDWDYAPLVLAPDDRSYKSQYLNNGPQRIGRKYKKVRFMAYTDETFKTREAIQHESGILGPLLYGEVGDTLLIIFKNQASRPYNIYPHGITDVRPLYSRRLPKGVKHLKDFPILPGEIFKYKWTVTVEDGPTKSDPRCLTRYYSSFVNMERDLASGLIGPLLICYKESVDQRGNQIMSDKRNVILFSVFDENRSWYLTENIQRFLPNPAGVQLEDPEFQASNIMHSINGYVFDSLQLSVCLHEVAYWYILSIGAQTDFLSVFFSGYTFKHKMVYEDTLTLFPFSGETVFMSMENPGLWILGCHNSDFRNRGMTALLKVSSCDKNTGDYYEDSYEDISAYLLSKNNAIEPRSFSQNGLGTSESATPESGPGSEPATSGSETPGTSESATPESGPGSEPATSGSETPGTSESATPESGPGTSTEPSEGSAPGSPAGSPTSTEEGTSESATPESGPGSEPATSGSETPGTSESATPESGPGSPAGSPTSTEEGSPAGSPTSTEEGTSTEPSEGSAPGTSESATPESGPGTSESATPESGPGTSESATPESGPGSEPATSGSETPGSEPATSGSETPGSPAGSPTSTEEGTSTEPSEGSAPGTSTEPSEGSAPGSEPATSGSETPGTSESATPESGPGTSTEPSEGSAPGLPPVLKRHQREITRTTLQSDQEEIDYDDTISVEMKKEDFDIYDEDENQSPRSFQKKTRHYFIAAVERLWDYGMSSSPHVLRNRAQSGSVPQFKKVVFQEFTDGSFTQPLYRGELNEHLGLLGPYIRAEVEDNIMVTFRNQASRPYSFYSSLISYEEDQRQGAEPRKNFVKPNETKTYFWKVQHHMAPTKDEFDCKAWAYFSDVDLEKDVHSGLIGPLLVCHTNTLNPAHGRQVTVQEFALFFTIFDETKSWYFTENMERNCRAPCNIQMEDPTFKENYRFHAINGYIMDTLPGLVMAQDQRIRWYLLSMGSNENIHSIHFSGHVFTVRKKEEYKMALYNLYPGVFETVEMLPSKAGIWRVECLIGEHLHAGMSTLFLVYSNKCQTPLGMASGHIRDFQITASGQYGQWAPKLARLHYSGSINAWSTKEPFSWIKVDLLAPMIIHGIKTQGARQKFSSLYISQFIIMYSLDGKKWQTYRGNSTGTLMVFFGNVDSSGIKHNIFNPPIIARYIRLHPTHYSIRSTLRMELMGCDLNSCSMPLGMESKAISDAQITASSYFTNMFATWTPSKARLHLQGRSNAWRPQVNNPKEWLQVDFQKTMKVTGVTTQGVKSLLTSMYVKEFLISSSQDGHQWTLFFQNGKVKVFQGNQDSFTPVVNSLDPPLLTRYLRIHPQSWVHQIALRMEVLGCEAQDLY

SEQ ID NO: 777 - DNA, 5250 bp, Artificial Sequence
  Description of Artificial Sequence: Synthetic polynucleotide
atgcaaatagagctctccacctgcttctttctgtgccttttgcgattctgctttagtgccaccagaagatactacctgggtgcagtggaactgtcatgggactatatgcaaagtgatctcggtgagctgcctgtggacgcaagatttcctcctagagtgccaaaatcttttccattcaacacctcagtcgtgtacaaaaagactctgtttgtagaattcacggttcaccttttcaacatcgctaagccaaggccaccctggatgggtctgctaggtcctaccatccaggctgaggtttatgatacagtggtcattacacttaagaacatggcttcccatcctgtcagccttcatgctgttggtgtatcctactggaaagcgtctgagggagctgaatatgatgatcagaccagtcaaagggagaaagaagatgataaagttttccctggtggaagccatacatatgtctggcaggtcctgaaagagaatggtccaatggcctctgacccactgtgccttacctactcatatctttctcatgtggacctggtaaaagacttgaattcaggcctcattggagccctactagtatgtagagaagggagtctggccaaggaaaagacacagaccttgcacaaatttatactactttttgctgtatttgatgaagggaaaagttggcactcagaaacaaagaactccttgatgcaggatagggatgctgcatctgctcgggcctggcctaaaatgcacacagtcaatggttatgtaaacagttctctgccaggtctgattggatgccacaggaaatcagtctattggcatgtgattggaatgggcaccactcctgaagtgcactcaatattcctcgaaggtcacacatttcttgtgaggaaccatcgccaggcgtccttggaaatctcgccaataactttccttactgctcaaacactcttgatggaccttggacagtttctactgttttgtcatatctcttcccaccaacatgatggcatggaagcctatgtcaaagtagacagctgtccagaggaaccccaactacgaatgaaaaataatgaagaagcggaagattatgatgatgatcttactgattctgaaatggatgtggtcaggtttgatgatgacaactctccttcctttatccaaattcgctcagttgccaagaagcatcctaaaacttgggtacattacattgctgctgaagaggaggactgggactatgctcccttagtcctcgcccccgatgacagaagttataaaagtcaatatttgaacaatggccctcagcggattggtaggaagtacaaaaaagtccgatttatggcatacacagatgaaacctttaagactcgtgaagctattcagcatgaatcaggaatcttgggacctttactttatggggaagttggagacacactgttgattatatttaagaatcaagcaagcagaccatataacatctaccctcacggaatcactgatgtccgtcctttgtattcaaggagattaccaaaaggtgtaaaacatttgaaggattttccaattctgccaggagaaatattcaaatataaatggacagtgactgtagaagatgggccaactaaatcagatcctcggtgcctgacccgctattactctagtttcgttaatatggagagagatctagcttcaggactcattggccctctcctcatctgctacaaagaatctgtagatcaaagaggaaaccagataatgtcagacaagaggaatgtcatcctgttttctgtatttgatgagaaccgaagctggtacctcacagagaatatacaacgctttctccccaatccagctggagtgcagcttgaggatccagagttccaagcctccaacatcatgcacagcatcaatggctatgtttttgatagtttgcagttgtcagtttgtttgcatgaggtggcatactggtacattctaagcattggagcacagactgacttcctttctgtgttcttctctggatataccttcaaacacaaaatggtctatgaagatacactcaccctattcccattctcaggagaaactgtgttcatgtcgatggaaaacccaggtctatggattctggggtgccacaactcagactttcggaacagaggcatgaccgccttactgaaggtttctagttgtgacaagaacactggtgattattacgaggacagttatgaagatatttcagcatacttgctgagtaaaaacaatgccattgaaccaagaagcttctcccagaatggtctcggtacctcagagtctgctacccccgagtcagggccaggatcagagccagccacctccgggtctgagacacccgggacttccgagagtgccacccctgagtccggacccgggtccgagcccgccacttccggctccgaaactcccggcacaagcgagagcgctaccccagagtcaggaccaggaacatctacagagccctctgaaggctccgctccagggtccccagccggcagtcccactagcaccgaggagggaacctctgaaagcgccacacccgaatcagggccagggtctgagcctgctaccagcggcagcgagacaccaggcacctctgagtccgccacaccagagtccggacccggatctcccgctgggagccccacctccactgaggagggatctcctgctggctctccaacatctactgaggaaggtacctcaaccgagccatccgagggatcagctcccggcacctcagagtcggcaaccccggagtctggacccggaacttccgaaagtgccacaccagagtccggtcccgggacttcagaatcagcaacacccgagtccggccctgggtctgaacccgccacaagtggtagtgagacaccaggatcagaacctgctacctcagggtcagagacacccggatctccggcaggctcaccaacctccactgaggagggcaccagcacagaaccaagcgagggctccgcacccggaacaagcactgaacccagtgagggttcagcacccggctctgagccggccacaagtggcagtgagacacccggcacttcagagagtgccacccccgagagtggcccaggcactagtaccgagccctctgaaggcagtgcgccaggtctcccaccagtcttgaaacgccatcaacgggaaataactcgtactactcttcagtcagatcaagaggaaattgactatgatgataccatatcagttgaaatgaagaaggaagattttgacatttatgatgaggatgaaaatcagagcccccgcagctttcaaaagaaaacacgacactattttattgctgcagtggagaggctctgggattatgggatgagtagctccccacatgttctaagaaacagggctcagagtggcagtgtccctcagttcaagaaagttgttttccaggaatttactgatggctcctttactcagcccttataccgtggagaactaaatgaacatttgggactcctggggccatatataagagcagaagttgaagataatatcatggtaactttcagaaatcaggcctctcgtccctattccttctattctagccttatttcttatgaggaagatcagaggcaaggagcagaacctagaaaaaactttgtcaagcctaatgaaaccaaaacttacttttggaaagtgcaacatcatatggcacccactaaagatgagtttgactgcaaagcctgggcttatttctctgatgttgacctggaaaaagatgtgcactcaggcctgattggaccccttctggtctgccacactaacacactgaaccctgctcatgggagacaagtgacagtacaggaatttgctctgtttttcaccatctttgatgaaaccaaaagctggtacttcactgaaaatatggaaagaaactgcagggctccctgcaatatccagatggaagatcccacttttaaagagaattatcgcttccatgcaatcaatggctacataatggatacactacctggcttagtaatggctcaggatcaaaggattcgatggtatctgctcagcatgggcagcaatgaaaacatccattctattcatttcagtggacatgtgttcactgtacgaaaaaaagaggagtataaaatggcactgtacaatctctatccaggtgtttttgagacagtggaaatgttaccatccaaagctggaatttggcgggtggaatgccttattggcgagcatctacatgctgggatgagcacactttttctggtgtacagcaataagtgtcagactcccctgggaatggcttctggacacattagagattttcagattacagcttcaggacaatatggacagtgggccccaaagctggccagacttcattattccggatcaatcaatgcctggagcaccaaggagcccttttcttggatcaaggtggatctgttggcaccaatgattattcacggcatcaagacccagggtgcccgtcagaagttctccagcctctacatctctcagtttatcatcatgtatagtcttgatgggaagaagtggcagacttatcgaggaaattccactggaaccttaatggttttctttggcaatgtggattcatctgggataaaacacaatatttttaaccctccaattattgctcgatacatccgtttgcacccaactcattatagcattcgcagcactcttcgcatggagttgatgggctgtgatttaaatagttgcagcatgccattgggaatggagagtaaagcaatatcagatgcacagattactgcttcatcctactttaccaatatgtttgccacctggactccttcaaaagctcgacttcacctccaagggaggagtaatgcctggcgacctcaggtgaataatccaaaagagtggctgcaagtggacttccagaaaacaatgaaagtcacaggagtaactactcagggagtaaaatctctgcttaccagcatgtatgtgaaggagttcctcatctccagcagtcaagatggccatcagtggactctcttttttcagaatggcaaagtaaaggtttttcagggaaatcaagactccttcacacctgtggtgaactctctagacccaccgttactgactcgctaccttcgaattcacccccagagttgggtgcaccagattgccctgaggatggaggttctgggctgcgaggcacaggacctctactga

SEQ ID NO: 778 - protein, 1524 aa, Artificial Sequence
  Description of Artificial Sequence: Synthetic polypeptide
MQIELSTCFFLCLLRFCFSATRRYYLGAVELSWDYMQSDLGELPVDARFPPRVPKSFPFNTSVVYKKTLFVEFTDHLFNIAKPRPPWMGLLGPTIQAEVYDTVVITLKNMASHPVSLHAVGVSYWKASEGAEYDDQTSQREKEDDKVFPGGSHTYVWQVLKENGPMASDPLCLTYSYLSHVDLVKDLNSGLIGALLVCREGSLAKEKTQTLHKFILLFAVFDEGKSWHSETKNSLMQDRDAASARAWPKMHTVNGYVNRSLPGLIGCHRKSVYWHVIGMGTTPEVHSIFLEGHTFLVRNHRQASLEISPITFLTAQTLLMDLGQFLLFCHISSHQHDGMEAYVKVDSCPEEPQLRMKNNEEAEDYDDDLTDSEMDVVRFDDDNSPSFIQIRSVAKKHPKTWVHYIAAEEEDWDYAPLVLAPDDRSYKSQYLNNGPQRIGRKYKKVRFMAYTDETFKTREAIQHESGILGPLLYGEVGDTLLIIFKNQASRPYNIYPHGITDVRPLYSRRLPKGVKHLKDFPILPGEIFKYKWTVTVEDGPTKSDPRCLTRYYSSFVNMERDLASGLIGPLLICYKESVDQRGNQIMSDKRNVILFSVFDENRSWYLTENIQRFLPNPAGVQLEDPEFQASNIMHSINGYVFDSLQLSVCLHEVAYWYILSIGAQTDFLSVFFSGYTFKHKMVYEDTLTLFPFSGETVFMSMENPGLWILGCHNSDFRNRGMTALLKVSSCDKNTGDYYEDSYEDISAYLLSKNNAIEPRSFSQNPPVLKRHQREITRTTLQSDQEEIDYDDTISVEMKKEDFDIYDEDENQSPRSFQKKTRHYFIAAVERLWDYGMSSSPHVLRNRAQSGSVPQFKKVVFQEFTDGSFTQPLYRGELNEHLGLLGPYIRAEVEDNIMVTFRNQASRPYSFYSSLISYEEDQRQGAEPRKNFVKPNETKTYFWKVQHHMAPTKDEFDCKAWAYFSDVDLEKDVHSGLIGPLLVCHTNTLNPAHGRQVTVQEFALFFTIFDETKSWYFTENMERNCRAPCNIQMEDPTFKENYRFHAINGYIMDTLPGLVMAQDQRIRWYLLSMGSNENIHSIHFSGHVFTVRKKEEYKMALYNLYPGVFETVEMLPSKAGIWRVECLIGEHLHAGMSTLFLVYSNKCQTPLGMASGHIRDFQITASGQYGQWAPKLARLHYSGSINAWSTKEPFSWIKVDLLAPMIIHGIKTQGARQKGAPGSPAGSPTSTEEGTSESATPESGPGSEPATSGSETPASSFSSLYISQFIIMYSLDGKKWQTYRGNSTGTLMVFFGNVDSSGIKHNIFNPPIIARYIRLHPTHYSIRSTLRMELMGCDLNSCSMPLGMESKAISDAQITASSYFTNMFATWSPSKARLHLQGRSNAWRPQVNNPKEWLQVDFQKTMKVTGVTTQGVKSLLTSMYVKEFLISSSQDGHQWTLFFQNGKVKVFQGNQDSFTPVVNSLDPPLLTRYLRIHPQSWVHQIALRMEVLGCEAQDLYGAGSPGAETAEQKLISEEDLSPATG

SEQ ID NO: 779 - DNA, 4575 bp, Artificial Sequence
  Description of Artificial Sequence: Synthetic polynucleotide
atgcaaatagagctctccacctgcttctttctgtgccttttgcgattctgctttagtgccaccagaagatactacctgggtgcagtggaactgtcatgggactatatgcaaagtgatctcggtgagctgcctgtggacgcaagatttcctcctagagtgccaaaatcttttccattcaacacctcagtcgtgtacaaaaagactctgtttgtagaattcacggatcaccttttcaacatcgctaagccaaggccaccctggatgggtctgctaggtcctaccatccaggctgaggtttatgatacagtggtcattacacttaagaacatggcttcccatcctgtcagtcttcatgctgttggtgtatcctactggaaagcttctgagggagctgaatatgatgatcagaccagtcaaagggagaaagaagatgataaagtcttccctggtggaagccatacatatgtctggcaggtcctgaaagagaatggtccaatggcctctgacccactgtgccttacctactcatatctttctcatgtggacctggtaaaagacttgaattcaggcctcattggagccctactagtatgtagagaagggagtctggccaaggaaaagacacagaccttgcacaaatttatactactttttgctgtatttgatgaagggaaaagttggcactcagaaacaaagaactccttgatgcaggatagggatgctgcatctgctcgggcctggcctaaaatgcacacagtcaatggttatgtaaacaggtctctgccaggtctgattggatgccacaggaaatcagtctattggcatgtgattggaatgggcaccactcctgaagtgcactcaatattcctcgaaggtcacacatttcttgtgaggaaccatcgccaggctagcttggaaatctcgccaataactttccttactgctcaaacactcttgatggaccttggacagtttctactgttttgtcatatctcttcccaccaacatgatggcatggaagcttatgtcaaagtagacagctgtccagaggaaccccaactacgaatgaaaaataatgaagaagcggaagactatgatgatgatcttactgattctgaaatggatgtggtcaggtttgatgatgacaactctccttcctttatccaaattcgctcagttgccaagaagcatcctaaaacttgggtacattacattgctgctgaagaggaggactgggactatgctcccttagtcctcgcccccgatgacagaagttataaaagtcaatatttgaacaatggccctcagcggattggtaggaagtacaaaaaagtccgatttatggcatacacagatgaaacctttaagactcgtgaagctattcagcatgaatcaggaatcttgggacctttactttatggggaagttggagacacactgttgattatatttaagaatcaagcaagcagaccatataacatctaccctcacggaatcactgatgtccgtcctttgtattcaaggagattaccaaaaggtgtaaaacatttgaaggattttccaattctgccaggagaaatattcaaatataaatggacagtgactgtagaagatgggccaactaaatcagatcctcggtgcctgacccgctattactctagtttcgttaatatggagagagatctagcttcaggactcattggccctctcctcatctgctacaaagaatctgtagatcaaagaggaaaccagataatgtcagacaagaggaatgtcatcctgttttctgtatttgatgagaaccgaagctggtacctcacagagaatatacaacgctttctccccaatccagctggagtgcagcttgaggatccagagttccaagcctccaacatcatgcacagcatcaatggctatgtttttgatagtttgcagttgtcagtttgtttgcatgaggtggcatactggtacattctaagcattggagcacagactgacttcctttctgtcttcttctctggatataccttcaaacacaaaatggtctatgaagacacactcaccctattcccattctcaggagaaactgtcttcatgtcgatggaaaacccaggtctatggattctggggtgccacaactcagactttcggaacagaggcatgaccgccttactgaaggtttctagttgtgacaagaacactggtgattattacgaggacagttatgaagatatttcagcatacttgctgagtaaaaacaatgccattgaaccaagaagcttctctcaaaacccaccagtcttgaaacgccatcaacgggaaataactcgtactactcttcagtcagatcaagaggaaatcgattatgatgataccatatcagttgaaatgaagaaggaagattttgacatttatgatgaggatgaaaatcagagcccccgcagctttcaaaagaaaacacgacactattttattgctgcagtggagaggctctgggattatgggatgagtagctccccacatgttctaagaaacagggctcagagtggcagtgtccctcagttcaagaaagttgttttccaggaatttactgatggctcctttactcagcccttataccgtggagaactaaatgaacatttgggactcctggggccatatataagagcagaagttgaagataatatcatggtaactttcagaaatcaggcctctcgtccctattccttctattctagccttatttcttatgaggaagatcagaggcaaggagcagaacctagaaaaaactttgtcaagcctaatgaaaccaaaacttacttttggaaagtgcaacatcatatggcacccactaaagatgagtttgactgcaaagcctgggcttatttctctgatgttgacctggaaaaagatgtgcactcaggcctgattggaccccttctggtctgccacactaacacactgaaccctgctcatgggagacaagtgacagtacaggaatttgctctgtttttcaccatctttgatgagaccaaaagctggtacttcactgaaaatatggaaagaaactgcagggctccctgcaatatccagatggaagatcccacttttaaagagaattatcgcttccatgcaatcaatggctacataatggatacactacctggcttagtaatggctcaggatcaaaggattcgatggtatctgctcagcatgggcagcaatgaaaacatccattctattcatttcagtggacatgtgttcactgtacgaaaaaaagaggagtataaaatggcactgtacaatctctatccaggtgtttttgagacagtggaaatgttaccatccaaagctggaatttggcgggtggaatgccttattggcgagcatctacatgctgggatgagcacactttttctggtgtacagcaataagtgtcagactcccctgggaatggcttctggacacattagagattttcagattacagcttcaggacaatatggacagtgggccccaaagctggccagacttcattattccggatcaatcaatgcctggagcaccaaggagcccttttcttggatcaaggtggatctgttggcaccaatgattattcacggcatcaagacccagggtgcccgtcagaagggcgcgccaggttctcctgctggctcccccacctcaacagaagaggggacaagcgaaagcgctacgcctgagagtggccctggctctgagccagccacctccggctctgaaacccctgcctcgagcttctccagcctctacatctctcagtttatcatcatgtatagtcttgatgggaagaagtggcagacttatcgaggaaattccactggaaccttaatggtcttctttggcaatgtggattcatctgggataaaacacaatatttttaaccctccaattattgctcgatacatccgtttgcacccaactcattatagcattcgcagcactcttcgcatggagttgatgggctgtgatttaaatagttgcagcatgccattgggaatggagagtaaagcaatatcagatgcacagattactgcttcatcctactttaccaatatgtttgccacctggtctccttcaaaagctcgacttcacctccaagggaggagtaatgcctggagacctcaggtgaataatccaaaagagtggctgcaagtggacttccagaagacaatgaaagtcacaggagtaactactcagggagtaaaatctctgcttaccagcatgtatgtgaaggagttcctcatctccagcagtcaagatggccatcagtggactctcttttttcagaatggcaaagtaaaggtttttcagggaaatcaagactccttcacacctgtggtgaactctctagacccaccgttactgactcgctaccttcgaattcacccccagagttgggtgcaccagattgccctgaggatggaggttctgggctgcgaggcacaggacctctacggcgccggatcacctggggccgaaacggccgaacaaaaactcatctcagaagaggatctgtcacctgcaaccggttga

SEQ ID NO: 780 - protein, 1524 aa, Artificial Sequence
  Description of Artificial Sequence: Synthetic polypeptide
MQIELSTCFFLCLLRFCFSATRRYYLGAVELSWDYMQSDLGELPVDARFPPRVPKSFPFNTSVVYKKTLFVEFTDHLFNIAKPRPPWMGLLGPTIQAEVYDTVVITLKNMASHPVSLHAVGVSYWKASEGAEYDDQTSQREKEDDKVFPGGSHTYVWQVLKENGPMASDPLCLTYSYLSHVDLVKDLNSGLIGALLVCREGSLAKEKTQTLHKFILLFAVFDEGKSWHSETKNSLMQDRDAASARAWPKMHTVNGYVNRSLPGLIGCHRKSVYWHVIGMGTTPEVHSIFLEGHTFLVRNHRQASLEISPITFLTAQTLLMDLGQFLLFCHISSHQHDGMEAYVKVDSCPEEPQLRMKNNEEAEDYDDDLTDSEMDVVRFDDDNSPSFIQIRSVAKKHPKTWVHYIAAEEEDWDYAPLVLAPDDRSYKSQYLNNGPQRIGRKYKKVRFMAYTDETFKTREAIQHESGILGPLLYGEVGDTLLIIFKNQASRPYNIYPHGITDVRPLYSRRLPKGVKHLKDFPILPGEIFKYKWTVTVEDGPTKSDPRCLTRYYSSFVNMERDLASGLIGPLLICYKESVDQRGNQIMSDKRNVILFSVFDENRSWYLTENIQRFLPNPAGVQLEDPEFQASNIMHSINGYVFDSLQLSVCLHEVAYWYILSIGAQTDFLSVFFSGYTFKHKMVYEDTLTLFPFSGETVFMSMENPGLWILGCHNSDFRNRGMTALLKVSSCDKNTGDYYEDSYEDISAYLLSKNNAIEPRSFSQNPPVLKRHQREITRTTLQSDQEEIDYDDTISVEMKKEDFDIYDEDENQSPRSFQKKTRHYFIAAVERLWDYGMSSSPHVLRNRAQSGSVPQFKKVVFQEFTDGSFTQPLYRGELNEHLGLLGPYIRAEVEDNIMVTFRNQASRPYSFYSSLISYEEDQRQGAEPRKNFVKPNETKTYFWKVQHHMAPTKDEFDCKAWAYFSDVDLEKDVHSGLIGPLLVCHTNTLNPAHGRQVTVQEFALFFTIFDETKSWYFTENMERNCRAPCNIQMEDPTFKENYRFHAINGYIMDTLPGLVMAQDQRIRWYLLSMGSNENIHSIHFSGHVFTVRKKEEYKMALYNLYPGVFETVEMLPSKAGIWRVECLIGEHLHAGMSTLFLVYSNKCQTPLGMASGHIRDFQITASGQYGQWAPKLARLHYSGSINAWSTKEPFSWIKVDLLAPMIIHGIKTQGARQKFSSLYISQFIIMYSLDGKKGAPGSPAGSPTSTEEGTSESATPESGPGSEPATSGSETPASSWQTYRGNSTGTLMVFFGNVDSSGIKHNIFNPPIIARYIRLHPTHYSIRSTLRMELMGCDLNSCSMPLGMESKAISDAQITASSYFTNMFATWSPSKARLHLQGRSNAWRPQVNNPKEWLQVDFQKTMKVTGVTTQGVKSLLTSMYVKEFLISSSQDGHQWTLFFQNGKVKVFQGNQDSFTPVVNSLDPPLLTRYLRIHPQSWVHQIALRMEVLGCEAQDLYGAGSPGAETAEQKLISEEDLSPATG

SEQ ID NO: 781 - DNA, 4575 bp, Artificial Sequence
  Description of Artificial Sequence: Synthetic polynucleotide
atgcaaatagagctctccacctgcttctttctgtgccttttgcgattctgctttagtgccaccagaagatactacctgggtgcagtggaactgtcatgggactatatgcaaagtgatctcggtgagctgcctgtggacgcaagatttcctcctagagtgccaaaatcttttccattcaacacctcagtcgtgtacaaaaagactctgtttgtagaattcacggatcaccttttcaacatcgctaagccaaggccaccctggatgggtctgctaggtcctaccatccaggctgaggtttatgatacagtggtcattacacttaagaacatggcttcccatcctgtcagtcttcatgctgttggtgtatcctactggaaagcttctgagggagctgaatatgatgatcagaccagtcaaagggagaaagaagatgataaagtcttccctggtggaagccatacatatgtctggcaggtcctgaaagagaatggtccaatggcctctgacccactgtgccttacctactcatatctttctcatgtggacctggtaaaagacttgaattcaggcctcattggagccctactagtatgtagagaagggagtctggccaaggaaaagacacagaccttgcacaaatttatactactttttgctgtatttgatgaagggaaaagttggcactcagaaacaaagaactccttgatgcaggatagggatgctgcatctgctcgggcctggcctaaaatgcacacagtcaatggttatgtaaacaggtctctgccaggtctgattggatgccacaggaaatcagtctattggcatgtgattggaatgggcaccactcctgaagtgcactcaatattcctcgaaggtcacacatttcttgtgaggaaccatcgccaggctagcttggaaatctcgccaataactttccttactgctcaaacactcttgatggaccttggacagtttctactgttttgtcatatctcttcccaccaacatgatggcatggaagcttatgtcaaagtagacagctgtccagaggaaccccaactacgaatgaaaaataatgaagaagcggaagactatgatgatgatcttactgattctgaaatggatgtggtcaggtttgatgatgacaactctccttcctttatccaaattcgctcagttgccaagaagcatcctaaaacttgggtacattacattgctgctgaagaggaggactgggactatgctcccttagtcctcgcccccgatgacagaagttataaaagtcaatatttgaacaatggccctcagcggattggtaggaagtacaaaaaagtccgatttatggcatacacagatgaaacctttaagactcgtgaagctattcagcatgaatcaggaatcttgggacctttactttatggggaagttggagacacactgttgattatatttaagaatcaagcaagcagaccatataacatctaccctcacggaatcactgatgtccgtcctttgtattcaaggagattaccaaaaggtgtaaaacatttgaaggattttccaattctgccaggagaaatattcaaatataaatggacagtgactgtagaagatgggccaactaaatcagatcctcggtgcctgacccgctattactctagtttcgttaatatggagagagatctagcttcaggactcattggccctctcctcatctgctacaaagaatctgtagatcaaagaggaaaccagataatgtcagacaagaggaatgtcatcctgttttctgtatttgatgagaaccgaagctggtacctcacagagaatatacaacgctttctccccaatccagctggagtgcagcttgaggatccagagttccaagcctccaacatcatgcacagcatcaatggctatgtttttgatagtttgcagttgtcagtttgtttgcatgaggtggcatactggtacattctaagcattggagcacagactgacttcctttctgtcttcttctctggatataccttcaaacacaaaatggtctatgaagacacactcaccctattcccattctcaggagaaactgtcttcatgtcgatggaaaacccaggtctatggattctggggtgccacaactcagactttcggaacagaggcatgaccgccttactgaaggtttctagttgtgacaagaacactggtgattattacgaggacagttatgaagatatttcagcatacttgctgagtaaaaacaatgccattgaaccaagaagcttctctcaaaacccaccagtcttgaaacgccatcaacgggaaataactcgtactactcttcagtcagatcaagaggaaatcgattatgatgataccatatcagttgaaatgaagaaggaagattttgacatttatgatgaggatgaaaatcagagcccccgcagctttcaaaagaaaacacgacactattttattgctgcagtggagaggctctgggattatgggatgagtagctccccacatgttctaagaaacagggctcagagtggcagtgtccctcagttcaagaaagttgttttccaggaatttactgatggctcctttactcagcccttataccgtggagaactaaatgaacatttgggactcctggggccatatataagagcagaagttgaagataatatcatggtaactttcagaaatcaggcctctcgtccctattccttctattctagccttatttcttatgaggaagatcagaggcaaggagcagaacctagaaaaaactttgtcaagcctaatgaaaccaaaacttacttttggaaagtgcaacatcatatggcacccactaaagatgagtttgactgcaaagcctgggcttatttctctgatgttgacctggaaaaagatgtgcactcaggcctgattggaccccttctggtctgccacactaacacactgaaccctgctcatgggagacaagtgacagtacaggaatttgctctgtttttcaccatctttgatgagaccaaaagctggtacttcactgaaaatatggaaagaaactgcagggctccctgcaatatccagatggaagatcccacttttaaagagaattatcgcttccatgcaatcaatggctacataatggatacactacctggcttagtaatggctcaggatcaaaggattcgatggtatctgctcagcatgggcagcaatgaaaacatccattctattcatttcagtggacatgtgttcactgtacgaaaaaaagaggagtataaaatggcactgtacaatctctatccaggtgtttttgagacagtggaaatgttaccatccaaagctggaatttggcgggtggaatgccttattggcgagcatctacatgctgggatgagcacactttttctggtgtacagcaataagtgtcagactcccctgggaatggcttctggacacattagagattttcagattacagcttcaggacaatatggacagtgggccccaaagctggccagacttcattattccggatcaatcaatgcctggagcaccaaggagcccttttcttggatcaaggtggatctgttggcaccaatgattattcacggcatcaagacccagggtgcccgtcagaagttctccagcctctacatctctcagtttatcatcatgtatagtcttgatgggaagaagggcgcgccaggttctcctgctggctcccccacctcaacagaagaggggacaagcgaaagcgctacgcctgagagtggccctggctctgagccagccacctccggctctgaaacccctgcctcgagctggcagacttatcgaggaaattccactggaaccttaatggtcttctttggcaatgtggattcatctgggataaaacacaatatttttaaccctccaattattgctcgatacatccgtttgcacccaactcattatagcattcgcagcactcttcgcatggagttgatgggctgtgatttaaatagttgcagcatgccattgggaatggagagtaaagcaatatcagatgcacagattactgcttcatcctactttaccaatatgtttgccacctggtctccttcaaaagctcgacttcacctccaagggaggagtaatgcctggagacctcaggtgaataatccaaaagagtggctgcaagtggacttccagaagacaatgaaagtcacaggagtaactactcagggagtaaaatctctgcttaccagcatgtatgtgaaggagttcctcatctccagcagtcaagatggccatcagtggactctcttttttcagaatggcaaagtaaaggtttttcagggaaatcaagactccttcacacctgtggtgaactctctagacccaccgttactgactcgctaccttcgaattcacccccagagttgggtgcaccagattgccctgaggatggaggttctgggctgcgaggcacaggacctctacggcgccggatcacctggggccgaaacggccgaacaaaaactcatctcagaagaggatctgtcacctgcaaccggttga

SEQ ID NO: 782 - protein, 1524 aa, Artificial Sequence
  Description of Artificial Sequence: Synthetic polypeptide
MQIELSTCFFLCLLRFCFSATRRYYLGAVELSWDYMQSDLGELPVDARFPPRVPKSFPFNTSVVYKKTLFVEFTDHLFNIAKPRPPWMGLLGPTIQAEVYDTVVITLKNMASHPVSLHAVGVSYWKASEGAEYDDQTSQREKEDDKVFPGGSHTYVWQVLKENGPMASDPLCLTYSYLSHVDLVKDLNSGLIGALLVCREGSLAKEKTQTLHKFILLFAVFDEGKSWHSETKNSLMQDRDAASARAWPKMHTVNGYVNRSLPGLIGCHRKSVYWHVIGMGTTPEVHSIFLEGHTFLVRNHRQASLEISPITFLTAQTLLMDLGQFLLFCHISSHQHDGMEAYVKVDSCPEEPQLRMKNNEEAEDYDDDLTDSEMDVVRFDDDNSPSFIQIRSVAKKHPKTWVHYIAAEEEDWDYAPLVLAPDDRSYKSQYLNNGPQRIGRKYKKVRFMAYTDETFKTREAIQHESGILGPLLYGEVGDTLLIIFKNQASRPYNIYPHGITDVRPLYSRRLPKGVKHLKDFPILPGEIFKYKWTVTVEDGPTKSDPRCLTRYYSSFVNMERDLASGLIGPLLICYKESVDQRGNQIMSDKRNVILFSVFDENRSWYLTENIQRFLPNPAGVQLEDPEFQASNIMHSINGYVFDSLQLSVCLHEVAYWYILSIGAQTDFLSVFFSGYTFKHKMVYEDTLTLFPFSGETVFMSMENPGLWILGCHNSDFRNRGMTALLKVSSCDKNTGDYYEDSYEDISAYLLSKNNAIEPRSFSQNPPVLKRHQREITRTTLQSDQEEIDYDDTISVEMKKEDFDIYDEDENQSPRSFQKKTRHYFIAAVERLWDYGMSSSPHVLRNRAQSGSVPQFKKVVFQEFTDGSFTQPLYRGELNEHLGLLGPYIRAEVEDNIMVTFRNQASRPYSFYSSLISYEEDQRQGAEPRKNFVKPNETKTYFWKVQHHMAPTKDEFDCKAWAYFSDVDLEKDVHSGLIGPLLVCHTNTLNPAHGRQVTVQEFALFFTIFDETKSWYFTENMERNCRAPCNIQMEDPTFKENYRFHAINGYIMDTLPGLVMAQDQRIRWYLLSMGSNENIHSIHFSGHVFTVRKKEEYKMALYNLYPGVFETVEMLPSKAGIWRVECLIGEHLHAGMSTLFLVYSNKCQTPLGMASGHIRDFQITASGQYGQWAPKLARLHYSGSINAWSTKEPFSWIKVDLLAPMIIHGIKTQGARQKFSSLYISQFIIMYSLDGKKWQTYRGNSTGAPGSPAGSPTSTEEGTSESATPESGPGSEPATSGSETPASSGTLMVFFGNVDSSGIKHNIFNPPIIARYIRLHPTHYSIRSTLRMELMGCDLNSCSMPLGMESKAISDAQITASSYFTNMFATWSPSKARLHLQGRSNAWRPQVNNPKEWLQVDFQKTMKVTGVTTQGVKSLLTSMYVKEFLISSSQDGHQWTLFFQNGKVKVFQGNQDSFTPVVNSLDPPLLTRYLRIHPQSWVHQIALRMEVLGCEAQDLYGAGSPGAETAEQKLISEEDLSPATG

SEQ ID NO: 783 - DNA, 4575 bp, Artificial Sequence
  Description of Artificial Sequence: Synthetic polynucleotide
atgcaaatagagctctccacctgcttctttctgtgccttttgcgattctgctttagtgccaccagaagatactacctgggtgcagtggaactgtcatgggactatatgcaaagtgatctcggtgagctgcctgtggacgcaagatttcctcctagagtgccaaaatcttttccattcaacacctcagtcgtgtacaaaaagactctgtttgtagaattcacggatcaccttttcaacatcgctaagccaaggccaccctggatgggtctgctaggtcctaccatccaggctgaggtttatgatacagtggtcattacacttaagaacatggcttcccatcctgtcagtcttcatgctgttggtgtatcctactggaaagcttctgagggagctgaatatgatgatcagaccagtcaaagggagaaagaagatgataaagtcttccctggtggaagccatacatatgtctggcaggtcctgaaagagaatggtccaatggcctctgacccactgtgccttacctactcatatctttctcatgtggacctggtaaaagacttgaattcaggcctcattggagccctactagtatgtagagaagggagtctggccaaggaaaagacacagaccttgcacaaatttatactactttttgctgtatttgatgaagggaaaagttggcactcagaaacaaagaactccttgatgcaggatagggatgctgcatctgctcgggcctggcctaaaatgcacacagtcaatggttatgtaaacaggtctctgccaggtctgattggatgccacaggaaatcagtctattggcatgtgattggaatgggcaccactcctgaagtgcactcaatattcctcgaaggtcacacatttcttgtgaggaaccatcgccaggctagcttggaaatctcgccaataactttccttactgctcaaacactcttgatggaccttggacagtttctactgttttgtcatatctcttcccaccaacatgatggcatggaagcttatgtcaaagtagacagctgtccagaggaaccccaactacgaatgaaaaataatgaagaagcggaagactatgatgatgatcttactgattctgaaatggatgtggtcaggtttgatgatgacaactctccttcctttatccaaattcgctcagttgccaagaagcatcctaaaacttgggtacattacattgctgctgaagaggaggactgggactatgctcccttagtcctcgcccccgatgacagaagttataaaagtcaatatttgaacaatggccctcagcggattggtaggaagtacaaaaaagtccgatttatggcatacacagatgaaacctttaagactcgtgaagctattcagcatgaatcaggaatcttgggacctttactttatggggaagttggagacacactgttgattatatttaagaatcaagcaagcagaccatataacatctaccctcacggaatcactgatgtccgtcctttgtattcaaggagattaccaaaaggtgtaaaacatttgaaggattttccaattctgccaggagaaatattcaaatataaatggacagtgactgtagaagatgggccaactaaatcagatcctcggtgcctgacccgctattactctagtttcgttaatatggagagagatctagcttcaggactcattggccctctcctcatctgctacaaagaatctgtagatcaaagaggaaaccagataatgtcagacaagaggaatgtcatcctgttttctgtatttgatgagaaccgaagctggtacctcacagagaatatacaacgctttctccccaatccagctggagtgcagcttgaggatccagagttccaagcctccaacatcatgcacagcatcaatggctatgtttttgatagtttgcagttgtcagtttgtttgcatgaggtggcatactggtacattctaagcattggagcacagactgacttcctttctgtcttcttctctggatataccttcaaacacaaaatggtctatgaagacacactcaccctattcccattctcaggagaaactgtcttcatgtcgatggaaaacccaggtctatggattctggggtgccacaactcagactttcggaacagaggcatgaccgccttactgaaggtttctagttgtgacaagaacactggtgattattacgaggacagttatgaagatatttcagcatacttgctgagtaaaaacaatgccattgaaccaagaagcttctctcaaaacccaccagtcttgaaacgccatcaacgggaaataactcgtactactcttcagtcagatcaagaggaaatcgattatgatgataccatatcagttgaaatgaagaaggaagattttgacatttatgatgaggatgaaaatcagagcccccgcagctttcaaaagaaaacacgacactattttattgctgcagtggagaggctctgggattatgggatgagtagctccccacatgttctaagaaacagggctcagagtggcagtgtccctcagttcaagaaagttgttttccaggaatttactgatggctcctttactcagcccttataccgtggagaactaaatgaacatttgggactcctggggccatatataagagcagaagttgaagataatatcatggtaactttcagaaatcaggcctctcgtccctattccttctattctagccttatttcttatgaggaagatcagaggcaaggagcagaacctagaaaaaactttgtcaagcctaatgaaaccaaaacttacttttggaaagtgcaacatcatatggcacccactaaagatgagtttgactgcaaagcctgggcttatttctctgatgttgacctggaaaaagatgtgcactcaggcctgattggaccccttctggtctgccacactaacacactgaaccctgctcatgggagacaagtgacagtacaggaatttgctctgtttttcaccatctttgatgagaccaaaagctggtacttcactgaaaatatggaaagaaactgcagggctccctgcaatatccagatggaagatcccacttttaaagagaattatcgcttccatgcaatcaatggctacataatggatacactacctggcttagtaatggctcaggatcaaaggattcgatggtatctgctcagcatgggcagcaatgaaaacatccattctattcatttcagtggacatgtgttcactgtacgaaaaaaagaggagtataaaatggcactgtacaatctctatccaggtgtttttgagacagtggaaatgttaccatccaaagctggaatttggcgggtggaatgccttattggcgagcatctacatgctgggatgagcacactttttctggtgtacagcaataagtgtcagactcccctgggaatggcttctggacacattagagattttcagattacagcttcaggacaatatggacagtgggccccaaagctggccagacttcattattccggatcaatcaatgcctggagcaccaaggagcccttttcttggatcaaggtggatctgttggcaccaatgattattcacggcatcaagacccagggtgcccgtcagaagttctccagcctctacatctctcagtttatcatcatgtatagtcttgatgggaagaagtggcagacttatcgaggaaattccactggcgcgccaggttctcctgctggctcccccacctcaacagaagaggggacaagcgaaagcgctacgcctgagagtggccctggctctgagccagccacctccggctctgaaacccctgcctcgagcggaaccttaatggtcttctttggcaatgtggattcatctgggataaaacacaatatttttaaccctccaattattgctcgatacatccgtttgcacccaactcattatagcattcgcagcactcttcgcatggagttgatgggctgtgatttaaatagttgcagcatgccattgggaatggagagtaaagcaatatcagatgcacagattactgcttcatcctactttaccaatatgtttgccacctggtctccttcaaaagctcgacttcacctccaagggaggagtaatgcctggagacctcaggtgaataatccaaaagagtggctgcaagtggacttccagaagacaatgaaagtcacaggagtaactactcagggagtaaaatctctgcttaccagcatgtatgtgaaggagttcctcatctccagcagtcaagatggccatcagtggactctcttttttcagaatggcaaagtaaaggtttttcagggaaatcaagactccttcacacctgtggtgaactctctagacccaccgttactgactcgctaccttcgaattcacccccagagttgggtgcaccagattgccctgaggatggaggttctgggctgcgaggcacaggacctctacggcgccggatcacctggggccgaaacggccgaacaaaaactcatctcagaagaggatctgtcacctgcaaccggttga

SEQ ID NO: 784 - protein, 1524 aa, Artificial Sequence
  Description of Artificial Sequence: Synthetic polypeptide
MQIELSTCFFLCLLRFCFSATRRYYLGAVELSWDYMQSDLGELPVDARFPPRVPKSFPFNTSVVYKKTLFVEFTDHLFNIAKPRPPWMGLLGPTIQAEVYDTVVITLKNMASHPVSLHAVGVSYWKASEGAEYDDQTSQREKEDDKVFPGGSHTYVWQVLKENGPMASDPLCLTYSYLSHVDLVKDLNSGLIGALLVCREGSLAKEKTQTLHKFILLFAVFDEGKSWHSETKNSLMQDRDAASARAWPKMHTVNGYVNRSLPGLIGCHRKSVYWHVIGMGTTPEVHSIFLEGHTFLVRNHRQASLEISPITFLTAQTLLMDLGQFLLFCHISSHQHDGMEAYVKVDSCPEEPQLRMKNNEEAEDYDDDLTDSEMDVVRFDDDNSPSFIQIRSVAKKHPKTWVHYIAAEEEDWDYAPLVLAPDDRSYKSQYLNNGPQRIGRKYKKVRFMAYTDETFKTREAIQHESGILGPLLYGEVGDTLLIIFKNQASRPYNIYPHGITDVRPLYSRRLPKGVKHLKDFPILPGEIFKYKWTVTVEDGPTKSDPRCLTRYYSSFVNMERDLASGLIGPLLICYKESVDQRGNQIMSDKRNVILFSVFDENRSWYLTENIQRFLPNPAGVQLEDPEFQASNIMHSINGYVFDSLQLSVCLHEVAYWYILSIGAQTDFLSVFFSGYTFKHKMVYEDTLTLFPFSGETVFMSMENPGLWILGCHNSDFRNRGMTALLKVSSCDKNTGDYYEDSYEDISAYLLSKNNAIEPRSFSQNPPVLKRHQREITRTTLQSDQEEIDYDDTISVEMKKEDFDIYDEDENQSPRSFQKKTRHYFIAAVERLWDYGMSSSPHVLRNRAQSGSVPQFKKVVFQEFTDGSFTQPLYRGELNEHLGLLGPYIRAEVEDNIMVTFRNQASRPYSFYSSLISYEEDQRQGAEPRKNFVKPNETKTYFWKVQHHMAPTKDEFDCKAWAYFSDVDLEKDVHSGLIGPLLVCHTNTLNPAHGRQVTVQEFALFFTIFDETKSWYFTENMERNCRAPCNIQMEDPTFKENYRFHAINGYIMDTLPGLVMAQDQRIRWYLLSMGSNENIHSIHFSGHVFTVRKKEEYKMALYNLYPGVFETVEMLPSKAGIWRVECLIGEHLHAGMSTLFLVYSNKCQTPLGMASGHIRDFQITASGQYGQWAPKLARLHYSGSINAWSTKEPFSWIKVDLLAPMIIHGIKTQGARQKFSSLYISQFIIMYSLDGKKWQTYRGNSTGTLMVFFGNVDSSGIKHNIFNPPIIARYIRLHPTHYSIRSTLRMELMGCDLGAPGSPAGSPTSTEEGTSESATPESGPGSEPATSGSETPASSNSCSMPLGMESKAISDAQITASSYFTNMFATWSPSKARLHLQGRSNAWRPQVNNPKEWLQVDFQKTMKVTGVTTQGVKSLLTSMYVKEFLISSSQDGHQWTLFFQNGKVKVFQGNQDSFTPVVNSLDPPLLTRYLRIHPQSWVHQIALRMEVLGCEAQDLYGAGSPGAETAEQKLISEEDLSPATG

SEQ ID NO: 785 - DNA, 4575 bp, Artificial Sequence
  Description of Artificial Sequence: Synthetic polynucleotide
atgcaaatagagctctccacctgcttctttctgtgccttttgcgattctgctttagtgccaccagaagatactacctgggtgcagtggaactgtcatgggactatatgcaaagtgatctcggtgagctgcctgtggacgcaagatttcctcctagagtgccaaaatcttttccattcaacacctcagtcgtgtacaaaaagactctgtttgtagaattcacggatcaccttttcaacatcgctaagccaaggccaccctggatgggtctgctaggtcctaccatccaggctgaggtttatgatacagtggtcattacacttaagaacatggcttcccatcctgtcagtcttcatgctgttggtgtatcctactggaaagcttctgagggagctgaatatgatgatcagaccagtcaaagggagaaagaagatgataaagtcttccctggtggaagccatacatatgtctggcaggtcctgaaagagaatggtccaatggcctctgacccactgtgccttacctactcatatctttctcatgtggacctggtaaaagacttgaattcaggcctcattggagccctactagtatgtagagaagggagtctggccaaggaaaagacacagaccttgcacaaatttatactactttttgctgtatttgatgaagggaaaagttggcactcagaaacaaagaactccttgatgcaggatagggatgctgcatctgctcgggcctggcctaaaatgcacacagtcaatggttatgtaaacaggtctctgccaggtctgattggatgccacaggaaatcagtctattggcatgtgattggaatgggcaccactcctgaagtgcactcaatattcctcgaaggtcacacatttcttgtgaggaaccatcgccaggctagcttggaaatctcgccaataactttccttactgctcaaacactcttgatggaccttggacagtttctactgttttgtcatatctcttcccaccaacatgatggcatggaagcttatgtcaaagtagacagctgtccagaggaaccccaactacgaatgaaaaataatgaagaagcggaagactatgatgatgatcttactgattctgaaatggatgtggtcaggtttgatgatgacaactctccttcctttatccaaattcgctcagttgccaagaagcatcctaaaacttgggtacattacattgctgctgaagaggaggactgggactatgctcccttagtcctcgcccccgatgacagaagttataaaagtcaatatttgaacaatggccctcagcggattggtaggaagtacaaaaaagtccgatttatggcatacacagatgaaacctttaagactcgtgaagctattcagcatgaatcaggaatcttgggacctttactttatggggaagttggagacacactgttgattatatttaagaatcaagcaagcagaccatataacatctaccctcacggaatcactgatgtccgtcctttgtattcaaggagattaccaaaaggtgtaaaacatttgaaggattttccaattctgccaggagaaatattcaaatataaatggacagtgactgtagaagatgggccaactaaatcagatcctcggtgcctgacccgctattactctagtttcgttaatatggagagagatctagcttcaggactcattggccctctcctcatctgctacaaagaatctgtagatcaaagaggaaaccagataatgtcagacaagaggaatgtcatcctgttttctgtatttgatgagaaccgaagctggtacctcacagagaatatacaacgctttctccccaatccagctggagtgcagcttgaggatccagagttccaagcctccaacatcatgcacagcatcaatggctatgtttttgatagtttgcagttgtcagtttgtttgcatgaggtggcatactggtacattctaagcattggagcacagactgacttcctttctgtcttcttctctggatataccttcaaacacaaaatggtctatgaagacacactcaccctattcccattctcaggagaaactgtcttcatgtcgatggaaaacccaggtctatggattctggggtgccacaactcagactttcggaacagaggcatgaccgccttactgaaggtttctagttgtgacaagaacactggtgattattacgaggacagttatgaagatatttcagcatacttgctgagtaaaaacaatgccattgaaccaagaagcttctctcaaaacccaccagtcttgaaacgccatcaacgggaaataactcgtactactcttcagtcagatcaagaggaaatcgattatgatgataccatatcagttgaaatgaagaaggaagattttgacatttatgatgaggatgaaaatcagagcccccgcagctttcaaaagaaaacacgacactattttattgctgcagtggagaggctctgggattatgggatgagtagctccccacatgttctaagaaacagggctcagagtggcagtgtccctcagttcaagaaagttgttttccaggaatttactgatggctcctttactcagcccttataccgtggagaactaaatgaacatttgggactcctggggccatatataagagcagaagttgaagataatatcatggtaactttcagaaatcaggcctctcgtccctattccttctattctagccttatttcttatgaggaagatcagaggcaaggagcagaacctagaaaaaactttgtcaagcctaatgaaaccaaaacttacttttggaaagtgcaacatcatatggcacccactaaagatgagtttgactgcaaagcctgggcttatttctctgatgttgacctggaaaaagatgtgcactcaggcctgattggaccccttctggtctgccacactaacacactgaaccctgctcatgggagacaagtgacagtacaggaatttgctctgtttttcaccatctttgatgagaccaaaagctggtacttcactgaaaatatggaaagaaactgcagggctccctgcaatatccagatggaagatcccacttttaaagagaattatcgcttccatgcaatcaatggctacataatggatacactacctggcttagtaatggctcaggatcaaaggattcgatggtatctgctcagcatgggcagcaatgaaaacatccattctattcatttcagtggacatgtgttcactgtacgaaaaaaagaggagtataaaatggcactgtacaatctctatccaggtgtttttgagacagtggaaatgttaccatccaaagctggaatttggcgggtggaatgccttattggcgagcatctacatgctgggatgagcacactttttctggtgtacagcaataagtgtcagactcccctgggaatggcttctggacacattagagattttcagattacagcttcaggacaatatggacagtgggccccaaagctggccagacttcattattccggatcaatcaatgcctggagcaccaaggagcccttttcttggatcaaggtggatctgttggcaccaatgattattcacggcatcaagacccagggtgcccgtcagaagttctccagcctctacatctctcagtttatcatcatgtatagtcttgatgggaagaagtggcagacttatcgaggaaattccactggaaccttaatggtcttctttggcaatgtggattcatctgggataaaacacaatatttttaaccctccaattattgctcgatacatccgtttgcacccaactcattatagcattcgcagcactcttcgcatggagttgatgggctgtgatttaggcgcgccaggttctcctgctggctcccccacctcaacagaagaggggacaagcgaaagcgctacgcctgagagtggccctggctctgagccagccacctccggctctgaaacccctgcctcgagcaatagttgcagcatgccattgggaatggagagtaaagcaatatcagatgcacagattactgcttcatcctactttaccaatatgtttgccacctggtctccttcaaaagctcgacttcacctccaagggaggagtaatgcctggagacctcaggtgaataatccaaaagagtggctgcaagtggacttccagaagacaatgaaagtcacaggagtaactactcagggagtaaaatctctgcttaccagcatgtatgtgaaggagttcctcatctccagcagtcaagatggccatcagtggactctcttttttcagaatggcaaagtaaaggtttttcagggaaatcaagactccttcacacctgtggtgaactctctagacccaccgttactgactcgctaccttcgaattcacccccagagttgggtgcaccagattgccctgaggatggaggttctgggctgcgaggcacaggacctctacggcgccggatcacctggggccgaaacggccgaacaaaaactcatctcagaagaggatctgtcacctgcaaccggttga

SEQ ID NO: 786 - protein, 1524 aa, Artificial Sequence
  Description of Artificial Sequence: Synthetic polypeptide
MQIELSTCFFLCLLRFCFSATRRYYLGAVELSWDYMQSDLGELPVDARFPPRVPKSFPFNTSVVYKKTLFVEFTDHLFNIAKPRPPWMGLLGPTIQAEVYDTVVITLKNMASHPVSLHAVGVSYWKASEGAEYDDQTSQREKEDDKVFPGGSHTYVWQVLKENGPMASDPLCLTYSYLSHVDLVKDLNSGLIGALLVCREGSLAKEKTQTLHKFILLFAVFDEGKSWHSETKNSLMQDRDAASARAWPKMHTVNGYVNRSLPGLIGCHRKSVYWHVIGMGTTPEVHSIFLEGHTFLVRNHRQASLEISPITFLTAQTLLMDLGQFLLFCHISSHQHDGMEAYVKVDSCPEEPQLRMKNNEEAEDYDDDLTDSEMDVVRFDDDNSPSFIQIRSVAKKHPKTWVHYIAAEEEDWDYAPLVLAPDDRSYKSQYLNNGPQRIGRKYKKVRFMAYTDETFKTREAIQHESGILGPLLYGEVGDTLLIIFKNQASRPYNIYPHGITDVRPLYSRRLPKGVKHLKDFPILPGEIFKYKWTVTVEDGPTKSDPRCLTRYYSSFVNMERDLASGLIGPLLICYKESVDQRGNQIMSDKRNVILFSVFDENRSWYLTENIQRFLPNPAGVQLEDPEFQASNIMHSINGYVFDSLQLSVCLHEVAYWYILSIGAQTDFLSVFFSGYTFKHKMVYEDTLTLFPFSGETVFMSMENPGLWILGCHNSDFRNRGMTALLKVSSCDKNTGDYYEDSYEDISAYLLSKNNAIEPRSFSQNPPVLKRHQREITRTTLQSDQEEIDYDDTISVEMKKEDFDIYDEDENQSPRSFQKKTRHYFIAAVERLWDYGMSSSPHVLRNRAQSGSVPQFKKVVFQEFTDGSFTQPLYRGELNEHLGLLGPYIRAEVEDNIMVTFRNQASRPYSFYSSLISYEEDQRQGAEPRKNFVKPNETKTYFWKVQHHMAPTKDEFDCKAWAYFSDVDLEKDVHSGLIGPLLVCHTNTLNPAHGRQVTVQEFALFFTIFDETKSWYFTENMERNCRAPCNIQMEDPTFKENYRFHAINGYIMDTLPGLVMAQDQRIRWYLLSMGSNENIHSIHFSGHVFTVRKKEEYKMALYNLYPGVFETVEMLPSKAGIWRVECLIGEHLHAGMSTLFLVYSNKCQTPLGMASGHIRDFQITASGQYGQWAPKLARLHYSGSINAWSTKEPFSWIKVDLLAPMIIHGIKTQGARQKFSSLYISQFIIMYSLDGKKWQTYRGNSTGTLMVFFGNVDSSGIKHNIFNPPIIARYIRLHPTHYSIRSTLRMELMGCDLNSCSMPLGMESKAISDAGAPGSPAGSPTSTEEGTSESATPESGPGSEPATSGSETPASSQITASSYFTNMFATWSPSKARLHLQGRSNAWRPQVNNPKEWLQVDFQKTMKVTGVTTQGVKSLLTSMYVKEFLISSSQDGHQWTLFFQNGKVKVFQGNQDSFTPVVNSLDPPLLTRYLRIHPQSWVHQIALRMEVLGCEAQDLYGAGSPGAETAEQKLISEEDLSPATG

SEQ ID NO: 787 - DNA, 4575 bp, Artificial Sequence
  Description of Artificial Sequence: Synthetic polynucleotide
atgcaaatagagctctccacctgcttctttctgtgccttttgcgattctgctttagtgccaccagaagatactacctgggtgcagtggaactgtcatgggactatatgcaaagtgatctcggtgagctgcctgtggacgcaagatttcctcctagagtgccaaaatcttttccattcaacacctcagtcgtgtacaaaaagactctgtttgtagaattcacggatcaccttttcaacatcgctaagccaaggccaccctggatgggtctgctaggtcctaccatccaggctgaggtttatgatacagtggtcattacacttaagaacatggcttcccatcctgtcagtcttcatgctgttggtgtatcctactggaaagcttctgagggagctgaatatgatgatcagaccagtcaaagggagaaagaagatgataaagtcttccctggtggaagccatacatatgtctggcaggtcctgaaagagaatggtccaatggcctctgacccactgtgccttacctactcatatctttctcatgtggacctggtaaaagacttgaattcaggcctcattggagccctactagtatgtagagaagggagtctggccaaggaaaagacacagaccttgcacaaatttatactactttttgctgtatttgatgaagggaaaagttggcactcagaaacaaagaactccttgatgcaggatagggatgctgcatctgctcgggcctggcctaaaatgcacacagtcaatggttatgtaaacaggtctctgccaggtctgattggatgccacaggaaatcagtctattggcatgtgattggaatgggcaccactcctgaagtgcactcaatattcctcgaaggtcacacatttcttgtgaggaaccatcgccaggctagcttggaaatctcgccaataactttccttactgctcaaacactcttgatggaccttggacagtttctactgttttgtcatatctcttcccaccaacatgatggcatggaagcttatgtcaaagtagacagctgtccagaggaaccccaactacgaatgaaaaataatgaagaagcggaagactatgatgatgatcttactgattctgaaatggatgtggtcaggtttgatgatgacaactctccttcctttatccaaattcgctcagttgccaagaagcatcctaaaacttgggtacattacattgctgctgaagaggaggactgggactatgctcccttagtcctcgcccccgatgacagaagttataaaagtcaatatttgaacaatggccctcagcggattggtaggaagtacaaaaaagtccgatttatggcatacacagatgaaacctttaagactcgtgaagctattcagcatgaatcaggaatcttgggacctttactttatggggaagttggagacacactgttgattatatttaagaatcaagcaagcagaccatataacatctaccctcacggaatcactgatgtccgtcctttgtattcaaggagattaccaaaaggtgtaaaacatttgaaggattttccaattctgccaggagaaatattcaaatataaatggacagtgactgtagaagatgggccaactaaatcagatcctcggtgcctgacccgctattactctagtttcgttaatatggagagagatctagcttcaggactcattggccctctcctcatctgctacaaagaatctgtagatcaaagaggaaaccagataatgtcagacaagaggaatgtcatcctgttttctgtatttgatgagaaccgaagctggtacctcacagagaatatacaacgctttctccccaatccagctggagtgcagcttgaggatccagagttccaagcctccaacatcatgcacagcatcaatggctatgtttttgatagtttgcagttgtcagtttgtttgcatgaggtggcatactggtacattctaagcattggagcacagactgacttcctttctgtcttcttctctggatataccttcaaacacaaaatggtctatgaagacacactcaccctattcccattctcaggagaaactgtcttcatgtcgatggaaaacccaggtctatggattctggggtgccacaactcagactttcggaacagaggcatgaccgccttactgaaggtttctagttgtgacaagaacactggtgattattacgaggacagttatgaagatatttcagcatacttgctgagtaaaaacaatgccattgaaccaagaagcttctctcaaaacccaccagtcttgaaacgccatcaacgggaaataactcgtactactcttcagtcagatcaagaggaaatcgattatgatgataccatatcagttgaaatgaagaaggaagattttgacatttatgatgaggatgaaaatcagagcccccgcagctttcaaaagaaaacacgacactattttattgctgcagtggagaggctctgggattatgggatgagtagctccccacatgttctaagaaacagggctcagagtggcagtgtccctcagttcaagaaagttgttttccaggaatttactgatggctcctttactcagcccttataccgtggagaactaaatgaacatttgggactcctggggccatatataagagcagaagttgaagataatatcatggtaactttcagaaatcaggcctctcgtccctattccttctattctagccttatttcttatgaggaagatcagaggcaaggagcagaacctagaaaaaactttgtcaagcctaatgaaaccaaaacttacttttggaaagtgcaacatcatatggcacccactaaagatgagtttgactgcaaagcctgggcttatttctctgatgttgacctggaaaaagatgtgcactcaggcctgattggaccccttctggtctgccacactaacacactgaaccctgctcatgggagacaagtgacagtacaggaatttgctctgtttttcaccatctttgatgagaccaaaagctggtacttcactgaaaatatggaaagaaactgcagggctccctgcaatatccagatggaagatcccacttttaaagagaattatcgcttccatgcaatcaatggctacataatggatacactacctggcttagtaatggctcaggatcaaaggattcgatggtatctgctcagcatgggcagcaatgaaaacatccattctattcatttcagtggacatgtgttcactgtacgaaaaaaagaggagtataaaatggcactgtacaatctctatccaggtgtttttgagacagtggaaatgttaccatccaaagctggaatttggcgggtggaatgccttattggcgagcatctacatgctgggatgagcacactttttctggtgtacagcaataagtgtcagactcccctgggaatggcttctggacacattagagattttcagattacagcttcaggacaatatggacagtgggccccaaagctggccagacttcattattccggatcaatcaatgcctggagcaccaaggagcccttttcttggatcaaggtggatctgttggcaccaatgattattcacggcatcaagacccagggtgcccgtcagaagttctccagcctctacatctctcagtttatcatcatgtatagtcttgatgggaagaagtggcagacttatcgaggaaattccactggaaccttaatggtcttctttggcaatgtggattcatctgggataaaacacaatatttttaaccctccaattattgctcgatacatccgtttgcacccaactcattatagcattcgcagcactcttcgcatggagttgatgggctgtgatttaaatagttgcagcatgccattgggaatggagagtaaagcaatatcagatgcaggcgcgccaggttctcctgctggctcccccacctcaacagaagaggggacaagcgaaagcgctacgcctgagagtggccctggctctgagccagccacctccggctctgaaacccctgcctcgagccagattactgcttcatcctactttaccaatatgtttgccacctggtctccttcaaaagctcgacttcacctccaagggaggagtaatgcctggagacctcaggtgaataatccaaaagagtggctgcaagtggacttccagaagacaatgaaagtcacaggagtaactactcagggagtaaaatctctgcttaccagcatgtatgtgaaggagttcctcatctccagcagtcaagatggccatcagtggactctcttttttcagaatggcaaagtaaaggtttttcagggaaatcaagactccttcacacctgtggtgaactctctagacccaccgttactgactcgctaccttcgaattcacccccagagttgggtgcaccagattgccctgaggatggaggttctgggctgcgaggcacaggacctctacggcgccggatcacctggggccgaaacggccgaacaaaaactcatctcagaagaggatctgtcacctgcaaccggttga

SEQ ID NO: 788 - protein, 1524 aa, Artificial Sequence
  Description of Artificial Sequence: Synthetic polypeptide
MQIELSTCFFLCLLRFCFSATRRYYLGAVELSWDYMQSDLGELPVDARFPPRVPKSFPFNTSVVYKKTLFVEFTDHLFNIAKPRPPWMGLLGPTIQAEVYDTVVITLKNMASHPVSLHAVGVSYWKASEGAEYDDQTSQREKEDDKVFPGGSHTYVWQVLKENGPMASDPLCLTYSYLSHVDLVKDLNSGLIGALLVCREGSLAKEKTQTLHKFILLFAVFDEGKSWHSETKNSLMQDRDAASARAWPKMHTVNGYVNRSLPGLIGCHRKSVYWHVIGMGTTPEVHSIFLEGHTFLVRNHRQASLEISPITFLTAQTLLMDLGQFLLFCHISSHQHDGMEAYVKVDSCPEEPQLRMKNNEEAEDYDDDLTDSEMDVVRFDDDNSPSFIQIRSVAKKHPKTWVHYIAAEEEDWDYAPLVLAPDDRSYKSQYLNNGPQRIGRKYKKVRFMAYTDETFKTREAIQHESGILGPLLYGEVGDTLLIIFKNQASRPYNIYPHGITDVRPLYSRRLPKGVKHLKDFPILPGEIFKYKWTVTVEDGPTKSDPRCLTRYYSSFVNMERDLASGLIGPLLICYKESVDQRGNQIMSDKRNVILFSVFDENRSWYLTENIQRFLPNPAGVQLEDPEFQASNIMHSINGYVFDSLQLSVCLHEVAYWYILSIGAQTDFLSVFFSGYTFKHKMVYEDTLTLFPFSGETVFMSMENPGLWILGCHNSDFRNRGMTALLKVSSCDKNTGDYYEDSYEDISAYLLSKNNAIEPRSFSQNPPVLKRHQREITRTTLQSDQEEIDYDDTISVEMKKEDFDIYDEDENQSPRSFQKKTRHYFIAAVERLWDYGMSSSPHVLRNRAQSGSVPQFKKVVFQEFTDGSFTQPLYRGELNEHLGLLGPYIRAEVEDNIMVTFRNQASRPYSFYSSLISYEEDQRQGAEPRKNFVKPNETKTYFWKVQHHMAPTKDEFDCKAWAYFSDVDLEKDVHSGLIGPLLVCHTNTLNPAHGRQVTVQEFALFFTIFDETKSWYFTENMERNCRAPCNIQMEDPTFKENYRFHAINGYIMDTLPGLVMAQDQRIRWYLLSMGSNENIHSIHFSGHVFTVRKKEEYKMALYNLYPGVFETVEMLPSKAGIWRVECLIGEHLHAGMSTLFLVYSNKCQTPLGMASGHIRDFQITASGQYGQWAPKLARLHYSGSINAWSTKEPFSWIKVDLLAPMIIHGIKTQGARQKFSSLYISQFIIMYSLDGKKWQTYRGNSTGTLMVFFGNVDSSGIKHNIFNPPIIARYIRLHPTHYSIRSTLRMELMGCDLNSCSMPLGMESKAISDAQITASSYFTNMFATWSPSKARLHLQGRSNAWRPQVNNPKGAPGSPAGSPTSTEEGTSESATPESGPGSEPATSGSETPASSEWLQVDFQKTMKVTGVTTQGVKSLLTSMYVKEFLISSSQDGHQWTLFFQNGKVKVFQGNQDSFTPVVNSLDPPLLTRYLRIHPQSWVHQIALRMEVLGCEAQDLYGAGSPGAETAEQKLISEEDLSPATG

SEQ ID NO: 789 - DNA, 4575 bp, Artificial Sequence
  Description of Artificial Sequence: Synthetic polynucleotide
atgcaaatagagctctccacctgcttctttctgtgccttttgcgattctgctttagtgccaccagaagatactacctgggtgcagtggaactgtcatgggactatatgcaaagtgatctcggtgagctgcctgtggacgcaagatttcctcctagagtgccaaaatcttttccattcaacacctcagtcgtgtacaaaaagactctgtttgtagaattcacggatcaccttttcaacatcgctaagccaaggccaccctggatgggtctgctaggtcctaccatccaggctgaggtttatgatacagtggtcattacacttaagaacatggcttcccatcctgtcagtcttcatgctgttggtgtatcctactggaaagcttctgagggagctgaatatgatgatcagaccagtcaaagggagaaagaagatgataaagtcttccctggtggaagccatacatatgtctggcaggtcctgaaagagaatggtccaatggcctctgacccactgtgccttacctactcatatctttctcatgtggacctggtaaaagacttgaattcaggcctcattggagccctactagtatgtagagaagggagtctggccaaggaaaagacacagaccttgcacaaatttatactactttttgctgtatttgatgaagggaaaagttggcactcagaaacaaagaactccttgatgcaggatagggatgctgcatctgctcgggcctggcctaaaatgcacacagtcaatggttatgtaaacaggtctctgccaggtctgattggatgccacaggaaatcagtctattggcatgtgattggaatgggcaccactcctgaagtgcactcaatattcctcgaaggtcacacatttcttgtgaggaaccatcgccaggctagcttggaaatctcgccaataactttccttactgctcaaacactcttgatggaccttggacagtttctactgttttgtcatatctcttcccaccaacatgatggcatggaagcttatgtcaaagtagacagctgtccagaggaaccccaactacgaatgaaaaataatgaagaagcggaagactatgatgatgatcttactgattctgaaatggatgtggtcaggtttgatgatgacaactctccttcctttatccaaattcgctcagttgccaagaagcatcctaaaacttgggtacattacattgctgctgaagaggaggactgggactatgctcccttagtcctcgcccccgatgacagaagttataaaagtcaatatttgaacaatggccctcagcggattggtaggaagtacaaaaaagtccgatttatggcatacacagatgaaacctttaagactcgtgaagctattcagcatgaatcaggaatcttgggacctttactttatggggaagttggagacacactgttgattatatttaagaatcaagcaagcagaccatataacatctaccctcacggaatcactgatgtccgtcctttgtattcaaggagattaccaaaaggtgtaaaacatttgaaggattttccaattctgccaggagaaatattcaaatataaatggacagtgactgtagaagatgggccaactaaatcagatcctcggtgcctgacccgctattactctagtttcgttaatatggagagagatctagcttcaggactcattggccctctcctcatctgctacaaagaatctgtagatcaaagaggaaaccagataatgtcagacaagaggaatgtcatcctgttttctgtatttgatgagaaccgaagctggtacctcacagagaatatacaacgctttctccccaatccagctggagtgcagcttgaggatccagagttccaagcctccaacatcatgcacagcatcaatggctatgtttttgatagtttgcagttgtcagtttgtttgcatgaggtggcatactggtacattctaagcattggagcacagactgacttcctttctgtcttcttctctggatataccttcaaacacaaaatggtctatgaagacacactcaccctattcccattctcaggagaaactgtcttcatgtcgatggaaaacccaggtctatggattctggggtgccacaactcagactttcggaacagaggcatgaccgccttactgaaggtttctagttgtgacaagaacactggtgattattacgaggacagttatgaagatatttcagcatacttgctgagtaaaaacaatgccattgaaccaagaagcttctctcaaaacccaccagtcttgaaacgccatcaacgggaaataactcgtactactcttcagtcagatcaagaggaaatcgattatgatgataccatatcagttgaaatgaagaaggaagattttgacatttatgatgaggatgaaaatcagagcccccgcagctttcaaaagaaaacacgacactattttattgctgcagtggagaggctctgggattatgggatgagtagctccccacatgttctaagaaacagggctcagagtggcagtgtccctcagttcaagaaagttgttttccaggaatttactgatggctcctttactcagcccttataccgtggagaactaaatgaacatttgggactcctggggccatatataagagcagaagttgaagataatatcatggtaactttcagaaatcaggcctctcgtccctattccttctattctagccttatttcttatgaggaagatcagaggcaaggagcagaacctagaaaaaactttgtcaagcctaatgaaaccaaaacttacttttggaaagtgcaacatcatatggcacccactaaagatgagtttgactgcaaagcctgggcttatttctctgatgttgacctggaaaaagatgtgcactcaggcctgattggaccccttctggtctgccacactaacacactgaaccctgctcatgggagacaagtgacagtacaggaatttgctctgtttttcaccatctttgatgagaccaaaagctggtacttcactgaaaatatggaaagaaactgcagggctccctgcaatatccagatggaagatcccacttttaaagagaattatcgcttccatgcaatcaatggctacataatggatacactacctggcttagtaatggctcaggatcaaaggattcgatggtatctgctcagcatgggcagcaatgaaaacatccattctattcatttcagtggacatgtgttcactgtacgaaaaaaagaggagtataaaatggcactgtacaatctctatccaggtgtttttgagacagtggaaatgttaccatccaaagctggaatttggcgggtggaatgccttattggcgagcatctacatgctgggatgagcacactttttctggtgtacagcaataagtgtcagactcccctgggaatggcttctggacacattagagattttcagattacagcttcaggacaatatggacagtgggccccaaagctggccagacttcattattccggatcaatcaatgcctggagcaccaaggagcccttttcttggatcaaggtggatctgttggcaccaatgattattcacggcatcaagacccagggtgcccgtcagaagttctccagcctctacatctctcagtttatcatcatgtatagtcttgatgggaagaagtggcagacttatcgaggaaattccactggaaccttaatggtcttctttggcaatgtggattcatctgggataaaacacaatatttttaaccctccaattattgctcgatacatccgtttgcacccaactcattatagcattcgcagcactcttcgcatggagttgatgggctgtgatttaaatagttgcagcatgccattgggaatggagagtaaagcaatatcagatgcacagattactgcttcatcctactttaccaatatgtttgccacctggtctccttcaaaagctcgacttcacctccaagggaggagtaatgcctggagacctcaggtgaataatccaaaaggcgcgccaggttctcctgctggctcccccacctcaacagaagaggggacaagcgaaagcgctacgcctgagagtggccctggctctgagccagccacctccggctctgaaacccctgcctcgagcgagtggctgcaagtggacttccagaagacaatgaaagtcacaggagtaactactcagggagtaaaatctctgcttaccagcatgtatgtgaaggagttcctcatctccagcagtcaagatggccatcagtggactctcttttttcagaatggcaaagtaaaggtttttcagggaaatcaagactccttcacacctgtggtgaactctctagacccaccgttactgactcgctaccttcgaattcacccccagagttgggtgcaccagattgccctgaggatggaggttctgggctgcgaggcacaggacctctacggcgccggatcacctggggccgaaacggccgaacaaaaactcatctcagaagaggatctgtcacctgcaaccggttga

SEQ ID NO: 790 - protein, 1524 aa, Artificial Sequence
  Description of Artificial Sequence: Synthetic polypeptide
MQIELSTCFFLCLLRFCFSATRRYYLGAVELSWDYMQSDLGELPVDARFPPRVPKSFPFNTSVVYKKTLFVEFTDHLFNIAKPRPPWMGLLGPTIQAEVYDTVVITLKNMASHPVSLHAVGVSYWKASEGAEYDDQTSQREKEDDKVFPGGSHTYVWQVLKENGPMASDPLCLTYSYLSHVDLVKDLNSGLIGALLVCREGSLAKEKTQTLHKFILLFAVFDEGKSWHSETKNSLMQDRDAASARAWPKMHTVNGYVNRSLPGLIGCHRKSVYWHVIGMGTTPEVHSIFLEGHTFLVRNHRQASLEISPITFLTAQTLLMDLGQFLLFCHISSHQHDGMEAYVKVDSCPEEPQLRMKNNEEAEDYDDDLTDSEMDVVRFDDDNSPSFIQIRSVAKKHPKTWVHYIAAEEEDWDYAPLVLAPDDRSYKSQYLNNGPQRIGRKYKKVRFMAYTDETFKTREAIQHESGILGPLLYGEVGDTLLIIFKNQASRPYNIYPHGITDVRPLYSRRLPKGVKHLKDFPILPGEIFKYKWTVTVEDGPTKSDPRCLTRYYSSFVNMERDLASGLIGPLLICYKESVDQRGNQIMSDKRNVILFSVFDENRSWYLTENIQRFLPNPAGVQLEDPEFQASNIMHSINGYVFDSLQLSVCLHEVAYWYILSIGAQTDFLSVFFSGYTFKHKMVYEDTLTLFPFSGETVFMSMENPGLWILGCHNSDFRNRGMTALLKVSSCDKNTGDYYEDSYEDISAYLLSKNNAIEPRSFSQNPPVLKRHQREITRTTLQSDQEEIDYDDTISVEMKKEDFDIYDEDENQSPRSFQKKTRHYFIAAVERLWDYGMSSSPHVLRNRAQSGSVPQFKKVVFQEFTDGSFTQPLYRGELNEHLGLLGPYIRAEVEDNIMVTFRNQASRPYSFYSSLISYEEDQRQGAEPRKNFVKPNETKTYFWKVQHHMAPTKDEFDCKAWAYFSDVDLEKDVHSGLIGPLLVCHTNTLNPAHGRQVTVQEFALFFTIFDETKSWYFTENMERNCRAPCNIQMEDPTFKENYRFHAINGYIMDTLPGLVMAQDQRIRWYLLSMGSNENIHSIHFSGHVFTVRKKEEYKMALYNLYPGVFETVEMLPSKAGIWRVECLIGEHLHAGMSTLFLVYSNKCQTPLGMASGHIRDFQITASGQYGQWAPKLARLHYSGSINAWSTKEPFSWIKVDLLAPMIIHGIKTQGARQKFSSLYISQFIIMYSLDGKKWQTYRGNSTGTLMVFFGNVDSSGIKHNIFNPPIIARYIRLHPTHYSIRSTLRMELMGCDLNSCSMPLGMESKAISDAQITASSYFTNMFATWSPSKARLHLQGRSNAWRPQVNNPKEWLQVDFQKTMKVTGVTTQGVKSLLTSMYVKEFLISSSQDGHQWTLFFQNGAPGSPAGSPTSTEEGTSESATPESGPGSEPATSGSETPASSGKVKVFQGNQDSFTPVVNSLDPPLLTRYLRIHPQSWVHQIALRMEVLGCEAQDLYGAGSPGAETAEQKLISEEDLSPATG

SEQ ID NO: 791 - DNA, 4575 bp, Artificial Sequence
  Description of Artificial Sequence: Synthetic polynucleotide
atgcaaatagagctctccacctgcttctttctgtgccttttgcgattctgctttagtgccaccagaagatactacctgggtgcagtggaactgtcatgggactatatgcaaagtgatctcggtgagctgcctgtggacgcaagatttcctcctagagtgccaaaatcttttccattcaacacctcagtcgtgtacaaaaagactctgtttgtagaattcacggatcaccttttcaacatcgctaagccaaggccaccctggatgggtctgctaggtcctaccatccaggctgaggtttatgatacagtggtcattacacttaagaacatggcttcccatcctgtcagtcttcatgctgttggtgtatcctactggaaagcttctgagggagctgaatatgatgatcagaccagtcaaagggagaaagaagatgataaagtcttccctggtggaagccatacatatgtctggcaggtcctgaaagagaatggtccaatggcctctgacccactgtgccttacctactcatatctttctcatgtggacctggtaaaagacttgaattcaggcctcattggagccctactagtatgtagagaagggagtctggccaaggaaaagacacagaccttgcacaaatttatactactttttgctgtatttgatgaagggaaaagttggcactcagaaacaaagaactccttgatgcaggatagggatgctgcatctgctcgggcctggcctaaaatgcacacagtcaatggttatgtaaacaggtctctgccaggtctgattggatgccacaggaaatcagtctattggcatgtgattggaatgggcaccactcctgaagtgcactcaatattcctcgaaggtcacacatttcttgtgaggaaccatcgccaggctagcttggaaatctcgccaataactttccttactgctcaaacactcttgatggaccttggacagtttctactgttttgtcatatctcttcccaccaacatgatggcatggaagcttatgtcaaagtagacagctgtccagaggaaccccaactacgaatgaaaaataatgaagaagcggaagactatgatgatgatcttactgattctgaaatggatgtggtcaggtttgatgatgacaactctccttcctttatccaaattcgctcagttgccaagaagcatcctaaaacttgggtacattacattgctgctgaagaggaggactgggactatgctcccttagtcctcgcccccgatgacagaagttataaaagtcaatatttgaacaatggccctcagcggattggtaggaagtacaaaaaagtccgatttatggcatacacagatgaaacctttaagactcgtgaagctattcagcatgaatcaggaatcttgggacctttactttatggggaagttggagacacactgttgattatatttaagaatcaagcaagcagaccatataacatctaccctcacggaatcactgatgtccgtcctttgtattcaaggagattaccaaaaggtgtaaaacatttgaaggattttccaattctgccaggagaaatattcaaatataaatggacagtgactgtagaagatgggccaactaaatcagatcctcggtgcctgacccgctattactctagtttcgttaatatggagagagatctagcttcaggactcattggccctctcctcatctgctacaaagaatctgtagatcaaagaggaaaccagataatgtcagacaagaggaatgtcatcctgttttctgtatttgatgagaaccgaagctggtacctcacagagaatatacaacgctttctccccaatccagctggagtgcagcttgaggatccagagttccaagcctccaacatcatgcacagcatcaatggctatgtttttgatagtttgcagttgtcagtttgtttgcatgaggtggcatactggtacattctaagcattggagcacagactgacttcctttctgtcttcttctctggatataccttcaaacacaaaatggtctatgaagacacactcaccctattcccattctcaggagaaactgtcttcatgtcgatggaaaacccaggtctatggattctggggtgccacaactcagactttcggaacagaggcatgaccgccttactgaaggtttctagttgtgacaagaacactggtgattattacgaggacagttatgaagatatttcagcatacttgctgagtaaaaacaatgccattgaaccaagaagcttctctcaaaacccaccagtcttgaaacgccatcaacgggaaataactcgtactactcttcagtcagatcaagaggaaatcgattatgatgataccatatcagttgaaatgaagaaggaagattttgacatttatgatgaggatgaaaatcagagcccccgcagctttcaaaagaaaacacgacactattttattgctgcagtggagaggctctgggattatgggatgagtagctccccacatgttctaagaaacagggctcagagtggcagtgtccctcagttcaagaaagttgttttccaggaatttactgatggctcctttactcagcccttataccgtggagaactaaatgaacatttgggactcctggggccatatataagagcagaagttgaagataatatcatggtaactttcagaaatcaggcctctcgtccctattccttctattctagccttatttcttatgaggaagatcagaggcaaggagcagaacctagaaaaaactttgtcaagcctaatgaaaccaaaacttacttttggaaagtgcaacatcatatggcacccactaaagatgagtttgactgcaaagcctgggcttatttctctgatgttgacctggaaaaagatgtgcactcaggcctgattggaccccttctggtctgccacactaacacactgaaccctgctcatgggagacaagtgacagtacaggaatttgctctgtttttcaccatctttgatgagaccaaaagctggtacttcactgaaaatatggaaagaaactgcagggctccctgcaatatccagatggaagatcccacttttaaagagaattatcgcttccatgcaatcaatggctacataatggatacactacctggcttagtaatggctcaggatcaaaggattcgatggtatctgctcagcatgggcagcaatgaaaacatccattctattcatttcagtggacatgtgttcactgtacgaaaaaaagaggagtataaaatggcactgtacaatctctatccaggtgtttttgagacagtggaaatgttaccatccaaagctggaatttggcgggtggaatgccttattggcgagcatctacatgctgggatgagcacactttttctggtgtacagcaataagtgtcagactcccctgggaatggcttctggacacattagagattttcagattacagcttcaggacaatatggacagtgggccccaaagctggccagacttcattattccggatcaatcaatgcctggagcaccaaggagcccttttcttggatcaaggtggatctgttggcaccaatgattattcacggcatcaagacccagggtgcccgtcagaagttctccagcctctacatctctcagtttatcatcatgtatagtcttgatgggaagaagtggcagacttatcgaggaaattccactggaaccttaatggtcttctttggcaatgtggattcatctgggataaaacacaatatttttaaccctccaattattgctcgatacatccgtttgcacccaactcattatagcattcgcagcactcttcgcatggagttgatgggctgtgatttaaatagttgcagcatgccattgggaatggagagtaaagcaatatcagatgcacagattactgcttcatcctactttaccaatatgtttgccacctggtctccttcaaaagctcgacttcacctccaagggaggagtaatgcctggagacctcaggtgaataatccaaaagagtggctgcaagtggacttccagaagacaatgaaagtcacaggagtaactactcagggagtaaaatctctgcttaccagcatgtatgtgaaggagttcctcatctccagcagtcaagatggccatcagtggactctcttttttcagaatggcgcgccaggttctcctgctggctcccccacctcaacagaagaggggacaagcgaaagcgctacgcctgagagtggccctggctctgagccagccacctccggctctgaaacccctgcctcgagcggcaaagtaaaggtttttcagggaaatcaagactccttcacacctgtggtgaactctctagacccaccgttactgactcgctaccttcgaattcacccccagagttgggtgcaccagattgccctgaggatggaggttctgggctgcgaggcacaggacctctacggcgccggatcacctggggccgaaacggccgaacaaaaactcatctcagaagaggatctgtcacctgcaaccggttga

SEQ ID NO: 792 - protein, 1775 aa, Artificial Sequence
  Description of Artificial Sequence: Synthetic polypeptide
MQIELSTCFFLCLLRFCFSATRRYYLGAVELSWDYMQSDLGELPVDARFPPRVPKSFPFNTSVVYKKTLFVEFTDHLFNIAKPRPPWMGLLGPTIQAEVYDTVVITLKNMASHPVSLHAVGVSYWKASEGAEYDDQTSQREKEDDKVFPGGSHTYVWQVLKENGPMASDPLCLTYSYLSHVDLVKDLNSGLIGALLVCREGSLAKEKTQTLHKFILLFAVFDEGKSWHSETKNSLMQDRDAASARAWPKMHTVNGYVNRSLPGLIGCHRKSVYWHVIGMGTTPEVHSIFLEGHTFLVRNHRQASLEISPITFLTAQTLLMDLGQFLLFCHISSHQHDGMEAYVKVDSCPEEPQLRMKNNEEAEDYDDDLTDSEMDVVRFDDDNSPSFIQIRSVAKKHPKTWVHYIAAEEEDWDYAPLVLAPDDRSYKSQYLNNGPQRIGRKYKKVRFMAYTDETFKTREAIQHESGILGPLLYGEVGDTLLIIFKNQASRPYNIYPHGITDVRPLYSRRLPKGVKHLKDFPILPGEIFKYKWTVTVEDGPTKSDPRCLTRYYSSFVNMERDLASGLIGPLLICYKESVDQRGNQIMSDKRNVILFSVFDENRSWYLTENIQRFLPNPAGVQLEDPEFQASNIMHSINGYVFDSLQLSVCLHEVAYWYILSIGAQTDFLSVFFSGYTFKHKMVYEDTLTLFPFSGETVFMSMENPGLWILGCHNSDFRNRGMTALLKVSSCDKNTGDYYEDSYEDISAYLLSKNNAIEPRSFSQNPPVLKRHQREITRTTLQSDQEEIDYDDTISVEMKKEDFDIYDEDENQSPRSFQKKTRHYFIAAVERLWDYGMSSSPHVLRNRAQSGSVPQFKKVVFQEFTDGSFTQPLYRGELNEHLGLLGPYIRAEVEDNIMVTFRNQASRPYSFYSSLISYEEDQRQGAEPRKNFVKPNETKTYFWKVQHHMAPTKDEFDCKAWAYFSDVDLEKDVHSGLIGPLLVCHTNTLNPAHGRQVTVQEFALFFTIFDETKSWYFTENMERNCRAPCNIQMEDPTFKENYRFHAINGYIMDTLPGLVMAQDQRIRWYLLSMGSNENIHSIHFSGHVFTVRKKEEYKMALYNLYPGVFETVEMLPSKAGIWRVECLIGEHLHAGMSTLFLVYSNKCQTPLGMASGHIRDFQITASGQYGQWAPKLARLHYSGSINAWSTKEPFSWIKVDLLAPMIIHGIKTQGARQKFSSLYISQFIIMYSLDGKKWQTYRGNSTGTLMVFFGNVDSSGIKHNIFNPPIIARYIRLHPTHYSIRSTLRMELMGCDLNSCSMPLGMESKAISDAQITASSYFTNMFATWSPSKARLHLQGRSNAWRPQVNNPKEWLQVDFQKTMKVTGVTTQGVKSLLTSMYVKEFLISSSQDGHQWTLFFQNGKVKVFQGNQDSFTPVVNSLDPPLLTRYLRIHPQSWVHQIALRMEVLGCEAQDLYGAGSPGAETAGTSESATPESGPGSEPATSGSETPGTSESATPESGPGSEPATSGSETPGTSESATPESGPGTSTEPSEGSAPGSPAGSPTSTEEGTSESATPESGPGSEPATSGSETPGTSESATPESGPGSPAGSPTSTEEGSPAGSPTSTEEGTSTEPSEGSAPGTSESATPESGPGTSESATPESGPGTSESATPESGPGSEPATSGSETPGSEPATSGSETPGSPAGSPTSTEEGTSTEPSEGSAPGTSTEPSEGSAPGSEPATSGSETPGTSESATPESGPGTSTEPSEGSAPGAETAEQKLISEEDLSPATG

SEQ ID NO: 793 - DNA, 5328 bp, Artificial Sequence
  Description of Artificial Sequence: Synthetic polynucleotide
atgcaaatagagctctccacctgcttctttctgtgccttttgcgattctgctttagtgccaccagaagatactacctgggtgcagtggaactgtcatgggactatatgcaaagtgatctcggtgagctgcctgtggacgcaagatttcctcctagagtgccaaaatcttttccattcaacacctcagtcgtgtacaaaaagactctgtttgtagaattcacggatcaccttttcaacatcgctaagccaaggccaccctggatgggtctgctaggtcctaccatccaggctgaggtttatgatacagtggtcattacacttaagaacatggcttcccatcctgtcagtcttcatgctgttggtgtatcctactggaaagcttctgagggagctgaatatgatgatcagaccagtcaaagggagaaagaagatgataaagtcttccctggtggaagccatacatatgtctggcaggtcctgaaagagaatggtccaatggcctctgacccactgtgccttacctactcatatctttctcatgtggacctggtaaaagacttgaattcaggcctcattggagccctactagtatgtagagaagggagtctggccaaggaaaagacacagaccttgcacaaatttatactactttttgctgtatttgatgaagggaaaagttggcactcagaaacaaagaactccttgatgcaggatagggatgctgcatctgctcgggcctggcctaaaatgcacacagtcaatggttatgtaaacaggtctctgccaggtctgattggatgccacaggaaatcagtctattggcatgtgattggaatgggcaccactcctgaagtgcactcaatattcctcgaaggtcacacatttcttgtgaggaaccatcgccaggctagcttggaaatctcgccaataactttccttactgctcaaacactcttgatggaccttggacagtttctactgttttgtcatatctcttcccaccaacatgatggcatggaagcttatgtcaaagtagacagctgtccagaggaaccccaactacgaatgaaaaataatgaagaagcggaagactatgatgatgatcttactgattctgaaatggatgtggtcaggtttgatgatgacaactctccttcctttatccaaattcgctcagttgccaagaagcatcctaaaacttgggtacattacattgctgctgaagaggaggactgggactatgctcccttagtcctcgcccccgatgacagaagttataaaagtcaatatttgaacaatggccctcagcggattggtaggaagtacaaaaaagtccgatttatggcatacacagatgaaacctttaagactcgtgaagctattcagcatgaatcaggaatcttgggacctttactttatggggaagttggagacacactgttgattatatttaagaatcaagcaagcagaccatataacatctaccctcacggaatcactgatgtccgtcctttgtattcaaggagattaccaaaaggtgtaaaacatttgaaggattttccaattctgccaggagaaatattcaaatataaatggacagtgactgtagaagatgggccaactaaatcagatcctcggtgcctgacccgctattactctagtttcgttaatatggagagagatctagcttcaggactcattggccctctcctcatctgctacaaagaatctgtagatcaaagaggaaaccagataatgtcagacaagaggaatgtcatcctgttttctgtatttgatgagaaccgaagctggtacctcacagagaatatacaacgctttctccccaatccagctggagtgcagcttgaggatccagagttccaagcctccaacatcatgcacagcatcaatggctatgtttttgatagtttgcagttgtcagtttgtttgcatgaggtggcatactggtacattctaagcattggagcacagactgacttcctttctgtcttcttctctggatataccttcaaacacaaaatggtctatgaagacacactcaccctattcccattctcaggagaaactgtcttcatgtcgatggaaaacccaggtctatggattctggggtgccacaactcagactttcggaacagaggcatgaccgccttactgaaggtttctagttgtgacaagaacactggtgattattacgaggacagttatgaagatatttcagcatacttgctgagtaaaaacaatgccattgaaccaagaagcttctctcaaaacccaccagtcttgaaacgccatcaacgggaaataactcgtactactcttcagtcagatcaagaggaaatcgattatgatgataccatatcagttgaaatgaagaaggaagattttgacatttatgatgaggatgaaaatcagagcccccgcagctttcaaaagaaaacacgacactattttattgctgcagtggagaggctctgggattatgggatgagtagctccccacatgttctaagaaacagggctcagagtggcagtgtccctcagttcaagaaagttgttttccaggaatttactgatggctcctttactcagcccttataccgtggagaactaaatgaacatttgggactcctggggccatatataagagcagaagttgaagataatatcatggtaactttcagaaatcaggcctctcgtccctattccttctattctagccttatttcttatgaggaagatcagaggcaaggagcagaacctagaaaaaactttgtcaagcctaatgaaaccaaaacttacttttggaaagtgcaacatcatatggcacccactaaagatgagtttgactgcaaagcctgggcttatttctctgatgttgacctggaaaaagatgtgcactcaggcctgattggaccccttctggtctgccacactaacacactgaaccctgctcatgggagacaagtgacagtacaggaatttgctctgtttttcaccatctttgatgagaccaaaagctggtacttcactgaaaatatggaaagaaactgcagggctccctgcaatatccagatggaagatcccacttttaaagagaattatcgcttccatgcaatcaatggctacataatggatacactacctggcttagtaatggctcaggatcaaaggattcgatggtatctgctcagcatgggcagcaatgaaaacatccattctattcatttcagtggacatgtgttcactgtacgaaaaaaagaggagtataaaatggcactgtacaatctctatccaggtgtttttgagacagtggaaatgttaccatccaaagctggaatttggcgggtggaatgccttattggcgagcatctacatgctgggatgagcacactttttctggtgtacagcaataagtgtcagactcccctgggaatggcttctggacacattagagattttcagattacagcttcaggacaatatggacagtgggccccaaagctggccagacttcattattccggatcaatcaatgcctggagcaccaaggagcccttttcttggatcaaggtggatctgttggcaccaatgattattcacggcatcaagacccagggtgcccgtcagaagttctccagcctctacatctctcagtttatcatcatgtatagtcttgatgggaagaagtggcagacttatcgaggaaattccactggaaccttaatggtcttctttggcaatgtggattcatctgggataaaacacaatatttttaaccctccaattattgctcgatacatccgtttgcacccaactcattatagcattcgcagcactcttcgcatggagttgatgggctgtgatttaaatagttgcagcatgccattgggaatggagagtaaagcaatatcagatgcacagattactgcttcatcctactttaccaatatgtttgccacctggtctccttcaaaagctcgacttcacctccaagggaggagtaatgcctggagacctcaggtgaataatccaaaagagtggctgcaagtggacttccagaagacaatgaaagtcacaggagtaactactcagggagtaaaatctctgcttaccagcatgtatgtgaaggagttcctcatctccagcagtcaagatggccatcagtggactctcttttttcagaatggcaaagtaaaggtttttcagggaaatcaagactccttcacacctgtggtgaactctctagacccaccgttactgactcgctaccttcgaattcacccccagagttgggtgcaccagattgccctgaggatggaggttctgggctgcgaggcacaggacctctacggcgccggatcacctggggccgaaacggccggtacctcagagtctgctacccccgagtcagggccaggatcagagccagccacctccgggtctgagacacccgggacttccgagagtgccacccctgagtccggacccgggtccgagcccgccacttccggctccgaaactcccggcacaagcgagagcgctaccccagagtcaggaccaggaacatctacagagccctctgaaggctccgctccagggtccccagccggcagtcccactagcaccgaggagggaacctctgaaagcgccacacccgaatcagggccagggtctgagcctgctaccagcggcagcgagacaccaggcacctctgagtccgccacaccagagtccggacccggatctcccgctgggagccccacctccactgaggagggatctcctgctggctctccaacatctactgaggaaggtacctcaaccgagccatccgagggatcagctcccggcacctcagagtcggcaaccccggagtctggacccggaacttccgaaagtgccacaccagagtccggtcccgggacttcagaatcagcaacacccgagtccggccctgggtctgaacccgccacaagtggtagtgagacaccaggatcagaacctgctacctcagggtcagagacacccggatctccggcaggctcaccaacctccactgaggagggcaccagcacagaaccaagcgagggctccgcacccggaacaagcactgaacccagtgagggttcagcacccggctctgagccggccacaagtggcagtgagacacccggcacttcagagagtgccacccccgagagtggcccaggcactagtaccgagccctctgaaggcagtgcgccaggggccgaaacggccgaacaaaaactcatctcagaagaggatctgtcacctgcaaccggttga

SEQ ID NO: 794 - protein, 1775 aa, Artificial Sequence
  Description of Artificial Sequence: Synthetic polypeptide
MQIELSTCFFLCLLRFCFSATRRYYLGAVELSWDYMQSDLGELPVDARFPPRVPKSFPFNTSVVYKKTLFVEFTDHLFNIAKPRPPWMGLLGPTIQAEVYDTVVITLKNMASHPVSLHAVGVSYWKASEGAEYDDQTSQREKEDDKVFPGGSHTYVWQVLKENGPMASDPLCLTYSYLSHVDLVKDLNSGLIGALLVCREGSLAKEKTQTLHKFILLFAVFDEGKSWHSETKNSLMQDRDAASARAWPKMHTVNGYVNRSLPGLIGCHRKSVYWHVIGMGTTPEVHSIFLEGHTFLVRNHRQASLEISPITFLTAQTLLMDLGQFLLFCHISSHQHDGMEAYVKVDSCPEEPQLRMKNNEEAEDYDDDLTDSEMDVVRFDDDNSPSFIQIRSVAKKHPKTWVHYIAAEEEDWDYAPLVLAPDDRSYKSQYLNNGPQRIGRKYKKVRFMAYTDETFKTREAIQHESGILGPLLYGEVGDTLLIIFKNQASRPYNIYPHGITDVRPLYSRRLPKGVKHLKDFPILPGEIFKYKWTVTVEDGPTKSDPRCLTRYYSSFVNMERDLASGLIGPLLICYKESVDQRGNQIMSDKRNVILFSVFDENRSWYLTENIQRFLPNPAGVQLEDPEFQASNIMHSINGYVFDSLQLSVCLHEVAYWYILSIGAQTDFLSVFFSGYTFKHKMVYEDTLTLFPFSGETVFMSMENPGLWILGCHNSDFRNRGMTALLKVSSCDKNTGDYYEDSYEDISAYLLSKNNAIEPRSFSQNPPVLKRHQREITRTTLQSDQEEIDYDDTISVEMKKEDFDIYDEDENQSPRSFQKKTRHYFIAAVERLWDYGMSSSPHVLRNRAQSGSVPQFKKVVFQEFTDGSFTQPLYRGELNEHLGLLGPYIRAEVEDNIMVTFRNQASRPYSFYSSLISYEEDQRQGAEPRKNFVKPNETKTYFWKVQHHMAPTKDEFDCKAWAYFSDVDLEKDVHSGLIGPLLVCHTNTLNPAHGRQVTVQEFALFFTIFDETKSWYFTENMERNCRAPCNIQMEDPTFKENYRFHAINGYIMDTLPGLVMAQDQRIRWYLLSMGSNENIHSIHFSGHVFTVRKKEEYKMALYNLYPGVFETVEMLPSKAGIWRVECLIGEHLHAGMSTLFLVYSNKCQTPLGMASGHIRDFQITASGQYGQWAPKLARLHYSGSINAWSTKEPFSWIKVDLLAPMIIHGIKTQGARQKFSSLYISQFIIMYSLDGKKWQTYRGNSTGTLMVFFGNVDSSGIKHNIFNPPIIARYIRLHPTHYSIRSTLRMELMGCDLNSCSMPLGMESKAISDAQITASSYFTNMFATWSPSKARLHLQGRSNAWRPQVNNPKEWLQVDFQKTMKVTGVTTQGVKSLLTSMYVKEFLISSSQDGHQWTLFFQNGKVKVFQGNQDSFTPVVNSLDPPLLTRYLRIHPQSWVHQIALRMEVLGCEAQDLYGAGSPGAETAPGASPGTSSTGSPGASPGTSSTGSPGTPGSGTASSSPGSSTPSGATGSPGTPGSGTASSSPGSSTPSGATGSPGTPGSGTASSSPGSSTPSGATGSPGSSTPSGATGSPGSSPSASTGTGPGSSPSASTGTGPGASPGTSSTGSPGTPGSGTASSSPGSSTPSGATGSPGSSPSASTGTGPGSSPSASTGTGPGASPGTSSTGSPGASPGTSSTGSPGSSTPSGATGSPGSSPSASTGTGPGASPGTSSTGSPGSSPSASTGTGPGTPGSGTASSSPGSSTPSGATGSGAETAEQKLISEEDLSPATG

SEQ ID NO: 795 - DNA, 5328 bp, Artificial Sequence
  Description of Artificial Sequence: Synthetic polynucleotide
atgcaaatagagctctccacctgcttctttctgtgccttttgcgattctgctttagtgccaccagaagatactacctgggtgcagtggaactgtcatgggactatatgcaaagtgatctcggtgagctgcctgtggacgcaagatttcctcctagagtgccaaaatcttttccattcaacacctcagtcgtgtacaaaaagactctgtttgtagaattcacggatcaccttttcaacatcgctaagccaaggccaccctggatgggtctgctaggtcctaccatccaggctgaggtttatgatacagtggtcattacacttaagaacatggcttcccatcctgtcagtcttcatgctgttggtgtatcctactggaaagcttctgagggagctgaatatgatgatcagaccagtcaaagggagaaagaagatgataaagtcttccctggtggaagccatacatatgtctggcaggtcctgaaagagaatggtccaatggcctctgacccactgtgccttacctactcatatctttctcatgtggacctggtaaaagacttgaattcaggcctcattggagccctactagtatgtagagaagggagtctggccaaggaaaagacacagaccttgcacaaatttatactactttttgctgtatttgatgaagggaaaagttggcactcagaaacaaagaactccttgatgcaggatagggatgctgcatctgctcgggcctggcctaaaatgcacacagtcaatggttatgtaaacaggtctctgccaggtctgattggatgccacaggaaatcagtctattggcatgtgattggaatgggcaccactcctgaagtgcactcaatattcctcgaaggtcacacatttcttgtgaggaaccatcgccaggctagcttggaaatctcgccaataactttccttactgctcaaacactcttgatggaccttggacagtttctactgttttgtcatatctcttcccaccaacatgatggcatggaagcttatgtcaaagtagacagctgtccagaggaaccccaactacgaatgaaaaataatgaagaagcggaagactatgatgatgatcttactgattctgaaatggatgtggtcaggtttgatgatgacaactctccttcctttatccaaattcgctcagttgccaagaagcatcctaaaacttgggtacattacattgctgctgaagaggaggactgggactatgctcccttagtcctcgcccccgatgacagaagttataaaagtcaatatttgaacaatggccctcagcggattggtaggaagtacaaaaaagtccgatttatggcatacacagatgaaacctttaagactcgtgaagctattcagcatgaatcaggaatcttgggacctttactttatggggaagttggagacacactgttgattatatttaagaatcaagcaagcagaccatataacatctaccctcacggaatcactgatgtccgtcctttgtattcaaggagattaccaaaaggtgtaaaacatttgaaggattttccaattctgccaggagaaatattcaaatataaatggacagtgactgtagaagatgggccaactaaatcagatcctcggtgcctgacccgctattactctagtttcgttaatatggagagagatctagcttcaggactcattggccctctcctcatctgctacaaagaatctgtagatcaaagaggaaaccagataatgtcagacaagaggaatgtcatcctgttttctgtatttgatgagaaccgaagctggtacctcacagagaatatacaacgctttctccccaatccagctggagtgcagcttgaggatccagagttccaagcctccaacatcatgcacagcatcaatggctatgtttttgatagtttgcagttgtcagtttgtttgcatgaggtggcatactggtacattctaagcattggagcacagactgacttcctttctgtcttcttctctggatataccttcaaacacaaaatggtctatgaagacacactcaccctattcccattctcaggagaaactgtcttcatgtcgatggaaaacccaggtctatggattctggggtgccacaactcagactttcggaacagaggcatgaccgccttactgaaggtttctagttgtgacaagaacactggtgattattacgaggacagttatgaagatatttcagcatacttgctgagtaaaaacaatgccattgaaccaagaagcttctctcaaaacccaccagtcttgaaacgccatcaacgggaaataactcgtactactcttcagtcagatcaagaggaaatcgattatgatgataccatatcagttgaaatgaagaaggaagattttgacatttatgatgaggatgaaaatcagagcccccgcagctttcaaaagaaaacacgacactattttattgctgcagtggagaggctctgggattatgggatgagtagctccccacatgttctaagaaacagggctcagagtggcagtgtccctcagttcaagaaagttgttttccaggaatttactgatggctcctttactcagcccttataccgtggagaactaaatgaacatttgggactcctggggccatatataagagcagaagttgaagataatatcatggtaactttcagaaatcaggcctctcgtccctattccttctattctagccttatttcttatgaggaagatcagaggcaaggagcagaacctagaaaaaactttgtcaagcctaatgaaaccaaaacttacttttggaaagtgcaacatcatatggcacccactaaagatgagtttgactgcaaagcctgggcttatttctctgatgttgacctggaaaaagatgtgcactcaggcctgattggaccccttctggtctgccacactaacacactgaaccctgctcatgggagacaagtgacagtacaggaatttgctctgtttttcaccatctttgatgagaccaaaagctggtacttcactgaaaatatggaaagaaactgcagggctccctgcaatatccagatggaagatcccacttttaaagagaattatcgcttccatgcaatcaatggctacataatggatacactacctggcttagtaatggctcaggatcaaaggattcgatggtatctgctcagcatgggcagcaatgaaaacatccattctattcatttcagtggacatgtgttcactgtacgaaaaaaagaggagtataaaatggcactgtacaatctctatccaggtgtttttgagacagtggaaatgttaccatccaaagctggaatttggcgggtggaatgccttattggcgagcatctacatgctgggatgagcacactttttctggtgtacagcaataagtgtcagactcccctgggaatggcttctggacacattagagattttcagattacagcttcaggacaatatggacagtgggccccaaagctggccagacttcattattccggatcaatcaatgcctggagcaccaaggagcccttttcttggatcaaggtggatctgttggcaccaatgattattcacggcatcaagacccagggtgcccgtcagaagttctccagcctctacatctctcagtttatcatcatgtatagtcttgatgggaagaagtggcagacttatcgaggaaattccactggaaccttaatggtcttctttggcaatgtggattcatctgggataaaacacaatatttttaaccctccaattattgctcgatacatccgtttgcacccaactcattatagcattcgcagcactcttcgcatggagttgatgggctgtgatttaaatagttgcagcatgccattgggaatggagagtaaagcaatatcagatgcacagattactgcttcatcctactttaccaatatgtttgccacctggtctccttcaaaagctcgacttcacctccaagggaggagtaatgcctggagacctcaggtgaataatccaaaagagtggctgcaagtggacttccagaagacaatgaaagtcacaggagtaactactcagggagtaaaatctctgcttaccagcatgtatgtgaaggagttcctcatctccagcagtcaagatggccatcagtggactctcttttttcagaatggcaaagtaaaggtttttcagggaaatcaagactccttcacacctgtggtgaactctctagacccaccgttactgactcgctaccttcgaattcacccccagagttgggtgcaccagattgccctgaggatggaggttctgggctgcgaggcacaggacctctacggcgccggatcacctggggccgaaacggccccgggagcgtcacccggtacgtcctcaacggggagccctggggcatcacccggcacgtcctcgacagggtcccccggaacaccgggttcggggactgcgtcgtcgtcacccggttcgtcaacacccagcggtgcgacgggttccccgggaacccccggatcaggaacagcgtcgtcgagccccggaagctcgaccccgtcaggagcgaccgggtcgccaggaacgcctgggtcgggtactgcctcatcgtcgccgggttcatcgacgccctccggagcaacaggttcacccgggtcgtccacccccagcggagcgactggatcaccgggatcgagcccgtcggcatcgacaggaacaggtcccggtagctccccatcggcctccacggggacggggcctggtgcgtcaccggggacaagcagcacgggttcgccgggaacgccagggtcagggaccgcgtcgtcgagcccagggtcgtccaccccaagcggggctactgggtccccgggtagctcgccgagcgcatcaacgggaaccggaccgggcagctccccctcagcgtcgacagggacaggccctggcgcgagcccgggaacatcgtcgacggggtcacccggagcatcgccagggacctcgtcaactggctcgcctggatcgtcaacgccctcgggagccacggggtcgcccggatcatccccgtccgcctcaactggcacaggccctggtgcttcccctggaacgtccagcacaggctcccccggttccagcccttccgcttcgactgggactggacccggaaccccgggatcggggacagcgtcaagctcgcccggaagctccacgccttcgggggcaaccgggtcaggggccgaaacggccgaacaaaaactcatctcagaagaggatctgtcacctgcaaccggttga

SEQ ID NO: 796 - protein, 2069 aa, Artificial Sequence
  Description of Artificial Sequence: Synthetic polypeptide
MQIELSTCFFLCLLRFCFSATRRYYLGAVELSWDYMQSDLGELPVDARFPPRVPKSFPFNTSVVYKKTLFVEFTDHLFNIAKPRPPWMGLLGPTIQAEVYDTVVITLKNMASHPVSLHAVGVSYWKASEGAEYDDQTSQREKEDDKVFPGGSHTYVWQVLKENGPMASDPLCLTYSYLSHVDLVKDLNSGLIGALLVCREGSLAKEKTQTLHKFILLFAVFDEGKSWHSETKNSLMQDRDAASARAWPKMHTVNGYVNRSLPGLIGCHRKSVYWHVIGMGTTPEVHSIFLEGHTFLVRNHRQASLEISPITFLTAQTLLMDLGQFLLFCHISSHQHDGMEAYVKVDSCPEEPQLRMKNNEEAEDYDDDLTDSEMDVVRFDDDNSPSFIQIRSVAKKHPKTWVHYIAAEEEDWDYAPLVLAPDDRSYKSQYLNNGPQRIGRKYKKVRFMAYTDETFKTREAIQHESGILGPLLYGEVGDTLLIIFKNQASRPYNIYPHGITDVRPLYSRRLPKGVKHLKDFPILPGEIFKYKWTVTVEDGPTKSDPRCLTRYYSSFVNMERDLASGLIGPLLICYKESVDQRGNQIMSDKRNVILFSVFDENRSWYLTENIQRFLPNPAGVQLEDPEFQASNIMHSINGYVFDSLQLSVCLHEVAYWYILSIGAQTDFLSVFFSGYTFKHKMVYEDTLTLFPFSGETVFMSMENPGLWILGCHNSDFRNRGMTALLKVSSCDKNTGDYYEDSYEDISAYLLSKNNAIEPRSFSQNGAPGTSESATPESGPGSEPATSGSETPGTSESATPESGPGSEPATSGSETPGTSESATPESGPGTSTEPSEGSAPGSPAGSPTSTEEGTSESATPESGPGSEPATSGSETPGTSESATPESGPGSPAGSPTSTEEGSPAGSPTSTEEGTSTEPSEGSAPGTSESATPESGPGTSESATPESGPGTSESATPESGPGSEPATSGSETPGSEPATSGSETPGSPAGSPTSTEEGTSTEPSEGSAPGTSTEPSEGSAPGSEPATSGSETPGTSESATPESGPGTSTEPSEGSAPASSPPVLKRHQREITRTTLQSDQEEIDYDDTISVEMKKEDFDIYDEDENQSPRSFQKKTRHYFIAAVERLWDYGMSSSPHVLRNRAQSGSVPQFKKVVFQEFTDGSFTQPLYRGELNEHLGLLGPYIRAEVEDNIMVTFRNQASRPYSFYSSLISYEEDQRQGAEPRKNFVKPNETKTYFWKVQHHMAPTKDEFDCKAWAYFSDVDLEKDVHSGLIGPLLVCHTNTLNPAHGRQVTVQEFALFFTIFDETKSWYFTENMERNCRAPCNIQMEDPTFKENYRFHAINGYIMDTLPGLVMAQDQRIRWYLLSMGSNENIHSIHFSGHVFTVRKKEEYKMALYNLYPGVFETVEMLPSKAGIWRVECLIGEHLHAGMSTLFLVYSNKCQTPLGMASGHIRDFQITASGQYGQWAPKLARLHYSGSINAWSTKEPFSWIKVDLLAPMIIHGIKTQGARQKFSSLYISQFIIMYSLDGKKWQTYRGNSTGTLMVFFGNVDSSGIKHNIFNPPIIARYIRLHPTHYSIRSTLRMELMGCDLNSCSMPLGMESKAISDAQITASSYFTNMFATWSPSKARLHLQGRSNAWRPQVNNPKEWLQVDFQKTMKVTGVTTQGVKSLLTSMYVKEFLISSSQDGHQWTLFFQNGKVKVFQGNQDSFTPVVNSLDPPLLTRYLRIHPQSWVHQIALRMEVLGCEAQDLYGAGSPGAETAPGASPGTSSTGSPGASPGTSSTGSPGTPGSGTASSSPGSSTPSGATGSPGTPGSGTASSSPGSSTPSGATGSPGTPGSGTASSSPGSSTPSGATGSPGSSTPSGATGSPGSSPSASTGTGPGSSPSASTGTGPGASPGTSSTGSPGTPGSGTASSSPGSSTPSGATGSPGSSPSASTGTGPGSSPSASTGTGPGASPGTSSTGSPGASPGTSSTGSPGSSTPSGATGSPGSSPSASTGTGPGASPGTSSTGSPGSSPSASTGTGPGTPGSGTASSSPGSSTPSGATGSGAETAEQKLISEEDLSPATG

SEQ ID NO: 797 - DNA, 6210 bp, Artificial Sequence
  Description of Artificial Sequence: Synthetic polynucleotide
atgcaaatagagctctccacctgcttctttctgtgccttttgcgattctgctttagtgccaccagaagatactacctgggtgcagtggaactgtcatgggactatatgcaaagtgatctcggtgagctgcctgtggacgcaagatttcctcctagagtgccaaaatcttttccattcaacacctcagtcgtgtacaaaaagactctgtttgtagaattcacggatcaccttttcaacatcgctaagccaaggccaccctggatgggtctgctaggtcctaccatccaggctgaggtttatgatacagtggtcattacacttaagaacatggcttcccatcctgtcagtcttcatgctgttggtgtatcctactggaaagcttctgagggagctgaatatgatgatcagaccagtcaaagggagaaagaagatgataaagtcttccctggtggaagccatacatatgtctggcaggtcctgaaagagaatggtccaatggcctctgacccactgtgccttacctactcatatctttctcatgtggacctggtaaaagacttgaattcaggcctcattggagccctactagtatgtagagaagggagtctggccaaggaaaagacacagaccttgcacaaatttatactactttttgctgtatttgatgaagggaaaagttggcactcagaaacaaagaactccttgatgcaggatagggatgctgcatctgctcgggcctggcctaaaatgcacacagtcaatggttatgtaaacaggtctctgccaggtctgattggatgccacaggaaatcagtctattggcatgtgattggaatgggcaccactcctgaagtgcactcaatattcctcgaaggtcacacatttcttgtgaggaaccatcgccaggctagcttggaaatctcgccaataactttccttactgctcaaacactcttgatggaccttggacagtttctactgttttgtcatatctcttcccaccaacatgatggcatggaagcttatgtcaaagtagacagctgtccagaggaaccccaactacgaatgaaaaataatgaagaagcggaagactatgatgatgatcttactgattctgaaatggatgtggtcaggtttgatgatgacaactctccttcctttatccaaattcgctcagttgccaagaagcatcctaaaacttgggtacattacattgctgctgaagaggaggactgggactatgctcccttagtcctcgcccccgatgacagaagttataaaagtcaatatttgaacaatggccctcagcggattggtaggaagtacaaaaaagtccgatttatggcatacacagatgaaacctttaagactcgtgaagctattcagcatgaatcaggaatcttgggacctttactttatggggaagttggagacacactgttgattatatttaagaatcaagcaagcagaccatataacatctaccctcacggaatcactgatgtccgtcctttgtattcaaggagattaccaaaaggtgtaaaacatttgaaggattttccaattctgccaggagaaatattcaaatataaatggacagtgactgtagaagatgggccaactaaatcagatcctcggtgcctgacccgctattactctagtttcgttaatatggagagagatctagcttcaggactcattggccctctcctcatctgctacaaagaatctgtagatcaaagaggaaaccagataatgtcagacaagaggaatgtcatcctgttttctgtatttgatgagaaccgaagctggtacctcacagagaatatacaacgctttctccccaatccagctggagtgcagcttgaggatccagagttccaagcctccaacatcatgcacagcatcaatggctatgtttttgatagtttgcagttgtcagtttgtttgcatgaggtggcatactggtacattctaagcattggagcacagactgacttcctttctgtcttcttctctggatataccttcaaacacaaaatggtctatgaagacacactcaccctattcccattctcaggagaaactgtcttcatgtcgatggaaaacccaggtctatggattctggggtgccacaactcagactttcggaacagaggcatgaccgccttactgaaggtttctagttgtgacaagaacactggtgattattacgaggacagttatgaagatatttcagcatacttgctgagtaaaaacaatgccattgaaccaagaagcttctctcaaaacggcgcgccaggtacctcagagtctgctacccccgagtcagggccaggatcagagccagccacctccgggtctgagacacccgggacttccgagagtgccacccctgagtccggacccgggtccgagcccgccacttccggctccgaaactcccggcacaagcgagagcgctaccccagagtcaggaccaggaacatctacagagccctctgaaggctccgctccagggtccccagccggcagtcccactagcaccgaggagggaacctctgaaagcgccacacccgaatcagggccagggtctgagcctgctaccagcggcagcgagacaccaggcacctctgagtccgccacaccagagtccggacccggatctcccgctgggagccccacctccactgaggagggatctcctgctggctctccaacatctactgaggaaggtacctcaaccgagccatccgagggatcagctcccggcacctcagagtcggcaaccccggagtctggacccggaacttccgaaagtgccacaccagagtccggtcccgggacttcagaatcagcaacacccgagtccggccctgggtctgaacccgccacaagtggtagtgagacaccaggatcagaacctgctacctcagggtcagagacacccggatctccggcaggctcaccaacctccactgaggagggcaccagcacagaaccaagcgagggctccgcacccggaacaagcactgaacccagtgagggttcagcacccggctctgagccggccacaagtggcagtgagacacccggcacttcagagagtgccacccccgagagtggcccaggcactagtaccgagccctctgaaggcagtgcgccagcctcgagcccaccagtcttgaaacgccatcaacgggaaataactcgtactactcttcagtcagatcaagaggaaatcgattatgatgataccatatcagttgaaatgaagaaggaagattttgacatttatgatgaggatgaaaatcagagcccccgcagctttcaaaagaaaacacgacactattttattgctgcagtggagaggctctgggattatgggatgagtagctccccacatgttctaagaaacagggctcagagtggcagtgtccctcagttcaagaaagttgttttccaggaatttactgatggctcctttactcagcccttataccgtggagaactaaatgaacatttgggactcctggggccatatataagagcagaagttgaagataatatcatggtaactttcagaaatcaggcctctcgtccctattccttctattctagccttatttcttatgaggaagatcagaggcaaggagcagaacctagaaaaaactttgtcaagcctaatgaaaccaaaacttacttttggaaagtgcaacatcatatggcacccactaaagatgagtttgactgcaaagcctgggcttatttctctgatgttgacctggaaaaagatgtgcactcaggcctgattggaccccttctggtctgccacactaacacactgaaccctgctcatgggagacaagtgacagtacaggaatttgctctgtttttcaccatctttgatgagaccaaaagctggtacttcactgaaaatatggaaagaaactgcagggctccctgcaatatccagatggaagatcccacttttaaagagaattatcgcttccatgcaatcaatggctacataatggatacactacctggcttagtaatggctcaggatcaaaggattcgatggtatctgctcagcatgggcagcaatgaaaacatccattctattcatttcagtggacatgtgttcactgtacgaaaaaaagaggagtataaaatggcactgtacaatctctatccaggtgtttttgagacagtggaaatgttaccatccaaagctggaatttggcgggtggaatgccttattggcgagcatctacatgctgggatgagcacactttttctggtgtacagcaataagtgtcagactcccctgggaatggcttctggacacattagagattttcagattacagcttcaggacaatatggacagtgggccccaaagctggccagacttcattattccggatcaatcaatgcctggagcaccaaggagcccttttcttggatcaaggtggatctgttggcaccaatgattattcacggcatcaagacccagggtgcccgtcagaagttctccagcctctacatctctcagtttatcatcatgtatagtcttgatgggaagaagtggcagacttatcgaggaaattccactggaaccttaatggtcttctttggcaatgtggattcatctgggataaaacacaatatttttaaccctccaattattgctcgatacatccgtttgcacccaactcattatagcattcgcagcactcttcgcatggagttgatgggctgtgatttaaatagttgcagcatgccattgggaatggagagtaaagcaatatcagatgcacagattactgcttcatcctactttaccaatatgtttgccacctggtctccttcaaaagctcgacttcacctccaagggaggagtaatgcctggagacctcaggtgaataatccaaaagagtggctgcaagtggacttccagaagacaatgaaagtcacaggagtaactactcagggagtaaaatctctgcttaccagcatgtatgtgaaggagttcctcatctccagcagtcaagatggccatcagtggactctcttttttcagaatggcaaagtaaaggtttttcagggaaatcaagactccttcacacctgtggtgaactctctagacccaccgttactgactcgctaccttcgaattcacccccagagttgggtgcaccagattgccctgaggatggaggttctgggctgcgaggcacaggacctctacggcgccggatcacctggggccgaaacggccccgggagcgtcacccggtacgtcctcaacggggagccctggggcatcacccggcacgtcctcgacagggtcccccggaacaccgggttcggggactgcgtcgtcgtcacccggttcgtcaacacccagcggtgcgacgggttccccgggaacccccggatcaggaacagcgtcgtcgagccccggaagctcgaccccgtcaggagcgaccgggtcgccaggaacgcctgggtcgggtactgcctcatcgtcgccgggttcatcgacgccctccggagcaacaggttcacccgggtcgtccacccccagcggagcgactggatcaccgggatcgagcccgtcggcatcgacaggaacaggtcccggtagctccccatcggcctccacggggacggggcctggtgcgtcaccggggacaagcagcacgggttcgccgggaacgccagggtcagggaccgcgtcgtcgagcccagggtcgtccaccccaagcggggctactgggtccccgggtagctcgccgagcgcatcaacgggaaccggaccgggcagctccccctcagcgtcgacagggacaggccctggcgcgagcccgggaacatcgtcgacggggtcacccggagcatcgccagggacctcgtcaactggctcgcctggatcgtcaacgccctcgggagccacggggtcgcccggatcatccccgtccgcctcaactggcacaggccctggtgcttcccctggaacgtccagcacaggctcccccggttccagcccttccgcttcgactgggactggacccggaaccccgggatcggggacagcgtcaagctcgcccggaagctccacgccttcgggggcaaccgggtcaggggccgaaacggccgaacaaaaactcatctcagaagaggatctgtcacctgcaaccggttga

SEQ ID NO: 798 - protein, 2114 aa, Artificial Sequence
  Description of Artificial Sequence: Synthetic polypeptide
MQIELSTCFFLCLLRFCFSATRGAPGSPAGSPTSTEEGTSESATPESGPGSEPATSGSETPASSATRRYYLGAVELSWDYMQSDLGELPVDARFPPRVPKSFPFNTSVVYKKTLFVEFTDHLFNIAKPRPPWMGLLGPTIQAEVYDTVVITLKNMASHPVSLHAVGVSYWKASEGAEYDDQTSQREKEDDKVFPGGSHTYVWQVLKENGPMASDPLCLTYSYLSHVDLVKDLNSGLIGALLVCREGSLAKEKTQTLHKFILLFAVFDEGKSWHSETKNSLMQDRDAASARAWPKMHTVNGYVNRSLPGLIGCHRKSVYWHVIGMGTTPEVHSIFLEGHTFLVRNHRQASLEISPITFLTAQTLLMDLGQFLLFCHISSHQHDGMEAYVKVDSCPEEPQLRMKNNEEAEDYDDDLTDSEMDVVRFDDDNSPSFIQIRSVAKKHPKTWVHYIAAEEEDWDYAPLVLAPDDRSYKSQYLNNGPQRIGRKYKKVRFMAYTDETFKTREAIQHESGILGPLLYGEVGDTLLIIFKNQASRPYNIYPHGITDVRPLYSRRLPKGVKHLKDFPILPGEIFKYKWTVTVEDGPTKSDPRCLTRYYSSFVNMERDLASGLIGPLLICYKESVDQRGNQIMSDKRNVILFSVFDENRSWYLTENIQRFLPNPAGVQLEDPEFQASNIMHSINGYVFDSLQLSVCLHEVAYWYILSIGAQTDFLSVFFSGYTFKHKMVYEDTLTLFPFSGETVFMSMENPGLWILGCHNSDFRNRGMTALLKVSSCDKNTGDYYEDSYEDISAYLLSKNNAIEPRSFSQNGAPGTSESATPESGPGSEPATSGSETPGTSESATPESGPGSEPATSGSETPGTSESATPESGPGTSTEPSEGSAPGSPAGSPTSTEEGTSESATPESGPGSEPATSGSETPGTSESATPESGPGSPAGSPTSTEEGSPAGSPTSTEEGTSTEPSEGSAPGTSESATPESGPGTSESATPESGPGTSESATPESGPGSEPATSGSETPGSEPATSGSETPGSPAGSPTSTEEGTSTEPSEGSAPGTSTEPSEGSAPGSEPATSGSETPGTSESATPESGPGTSTEPSEGSAPASSPPVLKRHQREITRTTLQSDQEEIDYDDTISVEMKKEDFDIYDEDENQSPRSFQKKTRHYFIAAVERLWDYGMSSSPHVLRNRAQSGSVPQFKKVVFQEFTDGSFTQPLYRGELNEHLGLLGPYIRAEVEDNIMVTFRNQASRPYSFYSSLISYEEDQRQGAEPRKNFVKPNETKTYFWKVQHHMAPTKDEFDCKAWAYFSDVDLEKDVHSGLIGPLLVCHTNTLNPAHGRQVTVQEFALFFTIFDETKSWYFTENMERNCRAPCNIQMEDPTFKENYRFHAINGYIMDTLPGLVMAQDQRIRWYLLSMGSNENIHSIHFSGHVFTVRKKEEYKMALYNLYPGVFETVEMLPSKAGIWRVECLIGEHLHAGMSTLFLVYSNKCQTPLGMASGHIRDFQITASGQYGQWAPKLARLHYSGSINAWSTKEPFSWIKVDLLAPMIIHGIKTQGARQKFSSLYISQFIIMYSLDGKKWQTYRGNSTGTLMVFFGNVDSSGIKHNIFNPPIIARYIRLHPTHYSIRSTLRMELMGCDLNSCSMPLGMESKAISDAQITASSYFTNMFATWSPSKARLHLQGRSNAWRPQVNNPKEWLQVDFQKTMKVTGVTTQGVKSLLTSMYVKEFLISSSQDGHQWTLFFQNGKVKVFQGNQDSFTPVVNSLDPPLLTRYLRIHPQSWVHQIALRMEVLGCEAQDLYGAGSPGAETAPGASPGTSSTGSPGASPGTSSTGSPGTPGSGTASSSPGSSTPSGATGSPGTPGSGTASSSPGSSTPSGATGSPGTPGSGTASSSPGSSTPSGATGSPGSSTPSGATGSPGSSPSASTGTGPGSSPSASTGTGPGASPGTSSTGSPGTPGSGTASSSPGSSTPSGATGSPGSSPSASTGTGPGSSPSASTGTGPGASPGTSSTGSPGASPGTSSTGSPGSSTPSGATGSPGSSPSASTGTGPGASPGTSSTGSPGSSPSASTGTGPGTPGSGTASSSPGSSTPSGATGSGAETAEQKLISEEDLSPATG

SEQ ID NO: 799 - DNA, 6345 bp, Artificial Sequence
  Description of Artificial Sequence: Synthetic polynucleotide
atgcaaatagagctctccacctgcttctttctgtgccttttgcgattctgctttagtgccaccagaggcgcgccaggttctcctgctggctcccccacctcaacagaagaggggacaagcgaaagcgctacgcctgagagtggccctggctctgagccagccacctccggctctgaaacccctgcctcgagcgctacaagaagatactacctgggtgcagtggaactgtcatgggactatatgcaaagtgatctcggtgagctgcctgtggacgcaagatttcctcctagagtgccaaaatcttttccattcaacacctcagtcgtgtacaaaaagactctgtttgtagaattcacggatcaccttttcaacatcgctaagccaaggccaccctggatgggtctgctaggtcctaccatccaggctgaggtttatgatacagtggtcattacacttaagaacatggcttcccatcctgtcagtcttcatgctgttggtgtatcctactggaaagcttctgagggagctgaatatgatgatcagaccagtcaaagggagaaagaagatgataaagtcttccctggtggaagccatacatatgtctggcaggtcctgaaagagaatggtccaatggcctctgacccactgtgccttacctactcatatctttctcatgtggacctggtaaaagacttgaattcaggcctcattggagccctactagtatgtagagaagggagtctggccaaggaaaagacacagaccttgcacaaatttatactactttttgctgtatttgatgaagggaaaagttggcactcagaaacaaagaactccttgatgcaggatagggatgctgcatctgctcgggcctggcctaaaatgcacacagtcaatggttatgtaaacaggtctctgccaggtctgattggatgccacaggaaatcagtctattggcatgtgattggaatgggcaccactcctgaagtgcactcaatattcctcgaaggtcacacatttcttgtgaggaaccatcgccaggctagcttggaaatctcgccaataactttccttactgctcaaacactcttgatggaccttggacagtttctactgttttgtcatatctcttcccaccaacatgatggcatggaagcttatgtcaaagtagacagctgtccagaggaaccccaactacgaatgaaaaataatgaagaagcggaagactatgatgatgatcttactgattctgaaatggatgtggtcaggtttgatgatgacaactctccttcctttatccaaattcgctcagttgccaagaagcatcctaaaacttgggtacattacattgctgctgaagaggaggactgggactatgctcccttagtcctcgcccccgatgacagaagttataaaagtcaatatttgaacaatggccctcagcggattggtaggaagtacaaaaaagtccgatttatggcatacacagatgaaacctttaagactcgtgaagctattcagcatgaatcaggaatcttgggacctttactttatggggaagttggagacacactgttgattatatttaagaatcaagcaagcagaccatataacatctaccctcacggaatcactgatgtccgtcctttgtattcaaggagattaccaaaaggtgtaaaacatttgaaggattttccaattctgccaggagaaatattcaaatataaatggacagtgactgtagaagatgggccaactaaatcagatcctcggtgcctgacccgctattactctagtttcgttaatatggagagagatctagcttcaggactcattggccctctcctcatctgctacaaagaatctgtagatcaaagaggaaaccagataatgtcagacaagaggaatgtcatcctgttttctgtatttgatgagaaccgaagctggtacctcacagagaatatacaacgctttctccccaatccagctggagtgcagcttgaggatccagagttccaagcctccaacatcatgcacagcatcaatggctatgtttttgatagtttgcagttgtcagtttgtttgcatgaggtggcatactggtacattctaagcattggagcacagactgacttcctttctgtcttcttctctggatataccttcaaacacaaaatggtctatgaagacacactcaccctattcccattctcaggagaaactgtcttcatgtcgatggaaaacccaggtctatggattctggggtgccacaactcagactttcggaacagaggcatgaccgccttactgaaggtttctagttgtgacaagaacactggtgattattacgaggacagttatgaagatatttcagcatacttgctgagtaaaaacaatgccattgaaccaagaagcttctctcaaaacggcgcgccaggtacctcagagtctgctacccccgagtcagggccaggatcagagccagccacctccgggtctgagacacccgggacttccgagagtgccacccctgagtccggacccgggtccgagcccgccacttccggctccgaaactcccggcacaagcgagagcgctaccccagagtcaggaccaggaacatctacagagccctctgaaggctccgctccagggtccccagccggcagtcccactagcaccgaggagggaacctctgaaagcgccacacccgaatcagggccagggtctgagcctgctaccagcggcagcgagacaccaggcacctctgagtccgccacaccagagtccggacccggatctcccgctgggagccccacctccactgaggagggatctcctgctggctctccaacatctactgaggaaggtacctcaaccgagccatccgagggatcagctcccggcacctcagagtcggcaaccccggagtctggacccggaacttccgaaagtgccacaccagagtccggtcccgggacttcagaatcagcaacacccgagtccggccctgggtctgaacccgccacaagtggtagtgagacaccaggatcagaacctgctacctcagggtcagagacacccggatctccggcaggctcaccaacctccactgaggagggcaccagcacagaaccaagcgagggctccgcacccggaacaagcactgaacccagtgagggttcagcacccggctctgagccggccacaagtggcagtgagacacccggcacttcagagagtgccacccccgagagtggcccaggcactagtaccgagccctctgaaggcagtgcgccagcctcgagcccaccagtcttgaaacgccatcaacgggaaataactcgtactactcttcagtcagatcaagaggaaatcgattatgatgataccatatcagttgaaatgaagaaggaagattttgacatttatgatgaggatgaaaatcagagcccccgcagctttcaaaagaaaacacgacactattttattgctgcagtggagaggctctgggattatgggatgagtagctccccacatgttctaagaaacagggctcagagtggcagtgtccctcagttcaagaaagttgttttccaggaatttactgatggctcctttactcagcccttataccgtggagaactaaatgaacatttgggactcctggggccatatataagagcagaagttgaagataatatcatggtaactttcagaaatcaggcctctcgtccctattccttctattctagccttatttcttatgaggaagatcagaggcaaggagcagaacctagaaaaaactttgtcaagcctaatgaaaccaaaacttacttttggaaagtgcaacatcatatggcacccactaaagatgagtttgactgcaaagcctgggcttatttctctgatgttgacctggaaaaagatgtgcactcaggcctgattggaccccttctggtctgccacactaacacactgaaccctgctcatgggagacaagtgacagtacaggaatttgctctgtttttcaccatctttgatgagaccaaaagctggtacttcactgaaaatatggaaagaaactgcagggctccctgcaatatccagatggaagatcccacttttaaagagaattatcgcttccatgcaatcaatggctacataatggatacactacctggcttagtaatggctcaggatcaaaggattcgatggtatctgctcagcatgggcagcaatgaaaacatccattctattcatttcagtggacatgtgttcactgtacgaaaaaaagaggagtataaaatggcactgtacaatctctatccaggtgtttttgagacagtggaaatgttaccatccaaagctggaatttggcgggtggaatgccttattggcgagcatctacatgctgggatgagcacactttttctggtgtacagcaataagtgtcagactcccctgggaatggcttctggacacattagagattttcagattacagcttcaggacaatatggacagtgggccccaaagctggccagacttcattattccggatcaatcaatgcctggagcaccaaggagcccttttcttggatcaaggtggatctgttggcaccaatgattattcacggcatcaagacccagggtgcccgtcagaagttctccagcctctacatctctcagtttatcatcatgtatagtcttgatgggaagaagtggcagacttatcgaggaaattccactggaaccttaatggtcttctttggcaatgtggattcatctgggataaaacacaatatttttaaccctccaattattgctcgatacatccgtttgcacccaactcattatagcattcgcagcactcttcgcatggagttgatgggctgtgatttaaatagttgcagcatgccattgggaatggagagtaaagcaatatcagatgcacagattactgcttcatcctactttaccaatatgtttgccacctggtctccttcaaaagctcgacttcacctccaagggaggagtaatgcctggagacctcaggtgaataatccaaaagagtggctgcaagtggacttccagaagacaatgaaagtcacaggagtaactactcagggagtaaaatctctgcttaccagcatgtatgtgaaggagttcctcatctccagcagtcaagatggccatcagtggactctcttttttcagaatggcaaagtaaaggtttttcagggaaatcaagactccttcacacctgtggtgaactctctagacccaccgttactgactcgctaccttcgaattcacccccagagttgggtgcaccagattgccctgaggatggaggttctgggctgcgaggcacaggacctctacggcgccggatcacctggggccgaaacggccccgggagcgtcacccggtacgtcctcaacggggagccctggggcatcacccggcacgtcctcgacagggtcccccggaacaccgggttcggggactgcgtcgtcgtcacccggttcgtcaacacccagcggtgcgacgggttccccgggaacccccggatcaggaacagcgtcgtcgagccccggaagctcgaccccgtcaggagcgaccgggtcgccaggaacgcctgggtcgggtactgcctcatcgtcgccgggttcatcgacgccctccggagcaacaggttcacccgggtcgtccacccccagcggagcgactggatcaccgggatcgagcccgtcggcatcgacaggaacaggtcccggtagctccccatcggcctccacggggacggggcctggtgcgtcaccggggacaagcagcacgggttcgccgggaacgccagggtcagggaccgcgtcgtcgagcccagggtcgtccaccccaagcggggctactgggtccccgggtagctcgccgagcgcatcaacgggaaccggaccgggcagctccccctcagcgtcgacagggacaggccctggcgcgagcccgggaacatcgtcgacggggtcacccggagcatcgccagggacctcgtcaactggctcgcctggatcgtcaacgccctcgggagccacggggtcgcccggatcatccccgtccgcctcaactggcacaggccctggtgcttcccctggaacgtccagcacaggctcccccggttccagcccttccgcttcgactgggactggacccggaaccccgggatcggggacagcgtcaagctcgcccggaagctccacgccttcgggggcaaccgggtcaggggccgaaacggccgaacaaaaactcatctcagaagaggatctgtcacctgcaaccggttga

SEQ ID NO: 800 - protein, 7 aa, Artificial Sequence
  Description of Artificial Sequence: Synthetic peptide
KLTRAET

SEQ ID NO: 801 - protein, 8 aa, Artificial Sequence
  Description of Artificial Sequence: Synthetic peptide
LGPVSGVP

SEQ ID NO: 802 - protein, 8 aa, Artificial Sequence
  Description of Artificial Sequence: Synthetic peptide
GPAGLGGA

SEQ ID NO: 803 - protein, 8 aa, Artificial Sequence
  Description of Artificial Sequence: Synthetic peptide
GPAGLRGA

SEQ ID NO: 804 - protein, 8 aa, Artificial Sequence
  Description of Artificial Sequence: Synthetic peptide
APLGLRLR

SEQ ID NO: 805 - protein, 8 aa, Artificial Sequence
  Description of Artificial Sequence: Synthetic peptide
PALPLVAQ

SEQ ID NO: 806 - protein, 36 aa, Artificial Sequence; identical to SEQ ID NO: 316
  Description of Artificial Sequence: Synthetic polypeptide

SEQ ID NO: 807 - protein, 36 aa, Artificial Sequence; identical to SEQ ID NO: 318
  Description of Artificial Sequence: Synthetic polypeptide

SEQ ID NO: 808 - protein, 36 aa, Artificial Sequence; identical to SEQ ID NO: 506
  Description of Artificial Sequence: Synthetic polypeptide

SEQ ID NO: 809 - protein, 36 aa, Artificial Sequence; identical to SEQ ID NO: 508
  Description of Artificial Sequence: Synthetic polypeptide

SEQ ID NO: 810 - protein, 42 aa, Artificial Sequence; identical to SEQ ID NO: 50
  Description of Artificial Sequence: Synthetic polypeptide

SEQ ID NO: 811 - protein, 42 aa, Artificial Sequence; identical to SEQ ID NO: 50
  Description of Artificial Sequence: Synthetic polypeptide

SEQ ID NO: 812 - protein, 42 aa, Artificial Sequence; identical to SEQ ID NO: 54
  Description of Artificial Sequence: Synthetic polypeptide

SEQ ID NO: 813 - protein, 42 aa, Artificial Sequence; identical to SEQ ID NO: 55
  Description of Artificial Sequence: Synthetic polypeptide

SEQ ID NO: 814 - protein, 144 aa, Artificial Sequence; identical to SEQ ID NO: 60
  Description of Artificial Sequence: Synthetic polypeptide

SEQ ID NO: 815 - protein, 144 aa, Artificial Sequence; identical to SEQ ID NO: 62
  Description of Artificial Sequence: Synthetic polypeptide

SEQ ID NO: 816 - protein, 288 aa, Artificial Sequence; identical to SEQ ID NO: 66
  Description of Artificial Sequence: Synthetic polypeptide

SEQ ID NO: 817 - protein, 288 aa, Artificial Sequence; identical to SEQ ID NO: 69
  Description of Artificial Sequence: Synthetic polypeptide

SEQ ID NO: 818 - protein, 504 aa, Artificial Sequence
  Description of Artificial Sequence: Synthetic polypeptide
GASPGTSSTGSPGSSPSASTGTGPGSSPSASTGTGPGTPGSGTASSSPGSSTPSGATGSPGSNPSASTGTGPGASPGTSSTGSPGTPGSGTASSSPGSSTPSGATGSPGTPGSGTASSSPGASPGTSSTGSPGASPGTSSTGSPGTPGSGTASSSPGSSTPSGATGSPGASPGTSSTGSPGTPGSGTASSSPGSSTPSGATGSPGSNPSASTGTGPGSSPSASTGTGPGSSTPSGATGSPGSSTPSGATGSPGASPGTSSTGSPGASPGTSSTGSPGASPGTSSTGSPGTPGSGTASSSPGASPGTSSTGSPGASPGTSSTGSPGASPGTSSTGSPGSSPSASTGTGPGTPGSGTASSSPGASPGTSSTGSPGASPGTSSTGSPGASPGTSSTGSPGSSTPSGATGSPGSSTPSGATGSPGASPGTSSTGSPGTPGSGTASSSPGSSTPSGATGSPGSSTPSGATGSPGSSTPSGATGSPGSSPSASTGTGPGASPGTSSTGSP

SEQ ID NO: 819 - protein, 576 aa, Artificial Sequence; identical to SEQ ID NO: 72
  Description of Artificial Sequence: Synthetic polypeptide

SEQ ID NO: 820 - protein, 576 aa, Artificial Sequence; identical to SEQ ID NO: 73
  Description of Artificial Sequence: Synthetic polypeptide

SEQ ID NO: 821 - protein, 576 aa, Artificial Sequence; identical to SEQ ID NO: 75
  Description of Artificial Sequence: Synthetic polypeptide

SEQ ID NO: 822 - protein, 540 aa, Artificial Sequence; identical to SEQ ID NO: 71
  Description of Artificial Sequence: Synthetic polypeptide

SEQ ID NO: 823 - protein, 836 aa, Artificial Sequence; identical to SEQ ID NO: 77
  Description of Artificial Sequence: Synthetic polypeptide

SEQ ID NO: 824 - protein, 864 aa, Artificial Sequence; identical to SEQ ID NO: 78
  Description of Artificial Sequence: Synthetic polypeptide

SEQ ID NO: 825 - protein, 875 aa, Artificial Sequence; identical to SEQ ID NO: 79
  Description of Artificial Sequence: Synthetic polypeptide
  MOD_RES (430)..(432): Any amino acid
  MOD_RES (443)..(446): Any amino acid

SEQ ID NO: 826 - protein, 864 aa, Artificial Sequence; identical to SEQ ID NO: 80
  Description of Artificial Sequence: Synthetic polypeptide

SEQ ID NO: 827 - protein, 875 aa, Artificial Sequence; identical to SEQ ID NO: 81
  Description of Artificial Sequence: Synthetic polypeptide

SEQ ID NO: 828 - protein, 1318 aa, Artificial Sequence; identical to SEQ ID NO: 84
  Description of Artificial Sequence: Synthetic polypeptide

SEQ ID NO: 829 - protein, 924 aa, Artificial Sequence; identical to SEQ ID NO: 83
  Description of Artificial Sequence: Synthetic polypeptide

SEQ ID NO: 830 - protein, 913 aa, Artificial Sequence; identical to SEQ ID NO: 82
  Description of Artificial Sequence: Synthetic polypeptide

SEQ ID NO: 831 - protein, 864 aa, Artificial Sequence; identical to SEQ ID NO: 85
  Description of Artificial Sequence: Synthetic polypeptide

SEQ ID NO: 832 - protein, 4 aa, Artificial Sequence
  Description of Artificial Sequence: Synthetic peptide
GGSG

SEQ ID NO: 833 - protein, 288 aa, Artificial Sequence
  Description of Artificial Sequence: Synthetic polypeptide
GSGGEGGSGGEGGSGGEGGSGGEGGSGGEGGSGGEGGSGGEGGSGGEGGSGGEGGSGGEGGSGGEGGSGGEGGSGGEGGSGGEGGSGGEGGSGGEGGSGGEGGSGGEGGSGGEGGSGGEGGSGGEGGSGGEGGSGGEGGSGGEGGSGGEGGSGGEGGSGGEGGSGGEGGSGGEGGSGGEGGSGGEGGSGGEGGSGGEGGSGGEGGSGGEGGSGGEGGSGGEGGSGGEGGSGGEGGSGGEGGSGGEGGSGGEGGSGGEGGSGGEGGSGGEGGSGGEGGSGGEGGSGGEG

SEQ ID NO: 834 - protein, 288 aa, Artificial Sequence
  Description of Artificial Sequence: Synthetic polypeptide
GEGEGGGEGGEGEGGGEGGEGEGGGEGGEGEGGGEGGEGEGGGEGGEGEGGGEGGEGEGGGEGGEGEGGGEGGEGEGGGEGGEGEGGGEGGEGEGGGEGGEGEGGGEGGEGEGGGEGGEGEGGGEGGEGEGGGEGGEGEGGGEGGEGEGGGEGGEGEGGGEGGEGEGGGEGGEGEGGGEGGEGEGGGEGGEGEGGGEGGEGEGGGEGGEGEGGGEGGEGEGGGEGGEGEGGGEGGEGEGGGEGGEGEGGGEGGEGEGGGEGGEGEGGGEGGEGEGGGEGGEGEGGGEG

SEQ ID NO: 835 - protein, 288 aa, Artificial Sequence
  Description of Artificial Sequence: Synthetic polypeptide
SSESSESSSSESSSESSESSSSESSSESSESSSSESSSESSESSSSESSSESSESSSSESSSESSESSSSESSSESSESSSSESSSESSESSSSESSSESSESSSSESSSESSESSSSESSSESSESSSSESSSESSESSSSESSSESSESSSSESSSESSESSSSESSSESSESSSSESSSESSESSSSESSSESSESSSSESSSESSESSSSESSSESSESSSSESSSESSESSSSESSSESSESSSSESSSESSESSSSESSSESSESSSSESSSESSESSSSES

SEQ ID NO: 836 - protein, 288 aa, Artificial Sequence
  Description of Artificial Sequence: Synthetic polypeptide
GEGSGEGSEGEGSEGSGEGEGSEGSGEGEGGSEGSEGEGGSEGSEGEGGSEGSEGEGSGEGSEGEGGSEGSEGEGSGEGSEGEGSEGGSEGEGGSEGSEGEGSGEGSEGEGGEGGSEGEGSEGSGEGEGSGEGSEGEGSEGSGEGEGSGEGSEGEGSEGSGEGEGSEGSGEGEGGSEGSEGEGSEGSGEGEGGEGSGEGEGSGEGSEGEGGGEGSEGEGSGEGGEGEGSEGGSEGEGGSEGGEGEGSEGSGEGEGSEGGSEGEGSEGGSEGEGSEGSGEGEGSEGSGE

SEQ ID NO: 837 - protein, 576 aa, Artificial Sequence
  Description of Artificial Sequence: Synthetic polypeptide
GGKPGEGGKPEGGGGKPGGKPEGEGEGKPGGKPEGGGKPGGGEGGKPEGGKPEGEGKPGGGEGKPGGKPEGGGGKPEGEGKPGGGGGKPGGKPEGEGKPGGGEGGKPEGKPGEGGEGKPGGKPEGGGEGKPGGGKPGEGGKPGEGKPGGGEGGKPEGGKPEGEGKPGGGEGKPGGKPGEGGKPEGGGEGKPGGKPGEGGEGKPGGGKPEGEGKPGGGKPGGGEGGKPEGEGKPGGKPEGGGEGKPGGKPEGGGKPEGGGEGKPGGGKPGEGGKPGEGEGKPGGKPEGEGKPGGEGGGKPEGKPGGGEGGKPEGGKPGEGGKPEGGKPGEGGEGKPGGGKPGEGGKPEGGGKPEGEGKPGGGGKPGEGGKPEGGKPEGGGEGKPGGGKPEGEGKPGGGEGKPGGKPEGGGGKPGEGGKPEGGKPGGEGGGKPEGEGKPGGKPGEGGGGKPGGKPEGEGKPGEGGEGKPGGKPEGGGEGKPGGKPEGGGEGKPGGGKPGEGGKPEGGGKPGEGGKPGEGGKPEGEGKPGGGEGKPGGKPGEGGKPEGGGEGKPGGKPGGEGGGKPEGGKPGEGGKPEG

SEQ ID NO: 838 - protein, 558 aa, Artificial Sequence
  Description of Artificial Sequence: Synthetic polypeptide
GEGKPGGKPGSGGGKPGEGGKPGSGEGKPGGKPGSGGSGKPGGKPGEGGKPEGGSGGKPGGGGKPGGKPGGEGSGKPGGKPEGGGKPEGGSGGKPGGKPEGGSGGKPGGKPGSGEGGKPGGGKPGGEGKPGSGKPGGEGSGKPGGKPEGGSGGKPGGKPEGGSGGKPGGSGKPGGKPGEGGKPEGGSGGKPGGSGKPGGKPEGGGSGKPGGKPGEGGKPGSGEGGKPGGGKPGGEGKPGSGKPGGEGSGKPGGKPGSGGEGKPGGKPEGGSGGKPGGGKPGGEGKPGSGGKPGEGGKPGSGGGKPGGKPGGEGEGKPGGKPGEGGKPGGEGSGKPGGGGKPGGKPGGEGGKPEGSGKPGGGSGKPGGKPEGGGGKPEGSGKPGGGGKPEGSGKPGGGKPEGGSGGKPGGSGKPGGKPGEGGGKPEGSGKPGGGSGKPGGKPEGGGKPEGGSGGKPGGKPEGGSGGKPGGKPGGEGSGKPGGKPGSGEGGKPGGKPGEGSGGKPGGKPEGGSGGKPGGSGKPGGKPEGGGSGKPGGKPGEGGKPGGEGSGKPGGSGKPG

SEQ ID NO: 839 - protein, 577 aa, Artificial Sequence
  Description of Artificial Sequence: Synthetic polypeptide
GGSGKPGKPGGSGSGKPGSGKPGGGSGKPGSGKPGGGSGKPGSGKPGGGSGKPGSGKPGGGGKPGSGSGKPGGGKPGGSGGKPGGGSGKPGKPGSGGSGKPGSGKPGGGSGGKPGKPGSGGSGGKPGKPGSGGGSGKPGKPGSGGSGGKPGKPGSGGSGGKPGKPGSGGSGKPGSGKPGGGSGKPGSGKPGSGGSGKPGKPGSGGSGKPGSGKPGSGSGKPGSGKPGGGSGKPGSGKPGSGGSGKPGKPGSGGGKPGSGSGKPGGGKPGSGSGKPGGGKPGGSGGKPGGSGGKPGKPGSGGGSGKPGKPGSGGGSGKPGKPGGSGSGKPGSGKPGGGSGKPGSGKPGSGGSGKPGKPGSGGSGGKPGKPGSGGGKPGSGSGKPGGGKPGSGSGKPGGGKPGSGSGKPGGGKPGSGSGKPGGSGKPGSGKPGGGSGGKPGKPGSGGSGKPGSGKPGSGGSGKPGKPGGSGSGKPGSGKPGGGSGKPGSGKPGGGSGKPGSGKPGGGSGKPGSGKPGGGGKPGSGSGKPGGSGGKPGKPGSGGSGGKPGKPGSGGSGKPGSGKPGGGSGGKPGKPGSGG

SEQ ID NO: 840 - protein, 576 aa, Artificial Sequence
  Description of Artificial Sequence: Synthetic polypeptide
GEGSGEGSEGEGSEGSGEGEGSEGSGEGEGGSEGSEGEGSEGSGEGEGGEGSGEGEGSGEGSEGEGGGEGSEGEGSGEGGEGEGSEGGSEGEGGSEGGEGEGSEGSGEGEGSEGGSEGEGSEGGSEGEGSEGSGEGEGSEGSGEGEGSEGSGEGEGSEGSGEGEGSEGGSEGEGGSEGSEGEGSGEGSEGEGGSEGSEGEGGGEGSEGEGSGEGSEGEGGSEGSEGEGGSEGSEGEGGEGSGEGEGSEGSGEGEGSGEGSEGEGSEGSGEGEGSEGSGEGEGGSEGSEGEGSGEGSEGEGSEGSGEGEGSEGSGEGEGGSEGSEGEGGSEGSEGEGGSEGSEGEGGEGSGEGEGSEGSGEGEGSGEGSEGEGSEGSGEGEGSEGSGEGEGGSEGSEGEGSEGSGEGEGGEGSGEGEGSGEGSEGEGGGEGSEGEGSEGSGEGEGSEGSGEGEGSEGGSEGEGGSEGSEGEGSEGGSEGEGSEGGSEGEGSEGSGEGEGSEGSGEGEGSGEGSEGEGGSEGGEGEGSEGGSEGEGSEGGSEGEGGEGSGEGEGGGEGSEGEGSEGSGEGEGSGEGSE

SEQ ID NO: 841 - protein, 288 aa, Artificial Sequence; identical to SEQ ID NO: 66
  Description of Artificial Sequence: Synthetic polypeptide

SEQ ID NO: 842 - protein, 288 aa, Artificial Sequence; identical to SEQ ID NO: 68
  Description of Artificial Sequence: Synthetic polypeptide

SEQ ID NO: 843 - protein, 576 aa, Artificial Sequence; identical to SEQ ID NO: 72
  Description of Artificial Sequence: Synthetic polypeptide

SEQ ID NO: 844 - protein, 577 aa, Artificial Sequence
  Description of Artificial Sequence: Synthetic polypeptide
AGSPAGSPTSTEEGTSESATPESGPGTSTEPSEGSAPGSPAGSPTSTEEGTSTEPSEGSAPGTSTEPSEGSAPGTSESATPESGPGSEPATSGSETPGSEPATSGSETPGSPAGSPTSTEEGTSESATPESGPGTSTEPSEGSAPGTSTEPSEGSAPGSPAGSPTSTEEGTSTEPSEGSAPGTSTEPSEGSAPGTSESATPESGPGTSTEPSEGSAPGTSESATPESGPGSEPATSGSETPGTSTEPSEGSAPGTSTEPSEGSAPGTSESATPESGPGTSESATPESGPGSPAGSPTSTEEGTSESATPESGPGSEPATSGSETPGTSESATPESGPGTSTEPSEGSAPGTSTEPSEGSAPGTSTEPSEGSAPGTSTEPSEGSAPGTSTEPSEGSAPGTSTEPSEGSAPGSPAGSPTSTEEGTSTEPSEGSAPGTSESATPESGPGSEPATSGSETPGTSESATPESGPGSEPATSGSETPGTSESATPESGPGTSTEPSEGSAPGTSESATPESGPGSPAGSPTSTEEGSPAGSPTSTEEGSPAGSPTSTEEGTSESATPESGPGTSTEPSEGSAP

SEQ ID NO: 845 - protein, 540 aa, Artificial Sequence; identical to SEQ ID NO: 71
  Description of Artificial Sequence: Synthetic polypeptide

SEQ ID NO: 846 - protein, 504 aa, Artificial Sequence; identical to SEQ ID NO: 818
  Description of Artificial Sequence: Synthetic polypeptide

SEQ ID NO: 847 - protein, 816 aa, Artificial Sequence
  Description of Artificial Sequence: Synthetic polypeptide
GSPAGSPTSTEEGTSESATPESGPGTSTEPSEGSAPGSPAGSPTSTEEGTSTEPSEGSAPGTSTEPSEGSAPGTSESATPESGPGSEPATSGSETPGSEPATSGSETPGSPAGSPTSTEEGTSESATPESGPGTSTEPSEGSAPGTSTEPSEGSAPGSPAGSPTSTEEGTSTEPSEGSAPGTSTEPSEGSAPGTSESATPESGPGTSTEPSEGSAPGTSESATPESGPGSEPATSGSETPGTSTEPSEGSAPGTSTEPSEGSAPGTSESATPESGPGTSESATPESGPGSPAGSPTSTEEGTSESATPESGPGSEPATSGSETPGTSESATPESGPGTSTEPSEGSAPGTSTEPSEGSAPGTSTEPSEGSAPGTSTEPSEGSAPGTSTEPSEGSAPGTSTEPSEGSAPGSPAGSPTSTEEGTSTEPSEGSAPGTSESATPESGPGSEPATSGSETPGTSESATPESGPGSEPATSGSETPGTSESATPESGPGTSTEPSEGSAPGTSESATPESGPGSPAGSPTSTEEGSPAGSPTSTEEGSPAGSPTSTEEGTSESATPESGPGTSTEPSEGSAPGTSESATPESGPGSEPATSGSETPGTSESATPESGPGSEPATSGSETPGTSESATPESGPGTSTEPSEGSAPGSPAGSPTSTEEGTSESATPESGPGSEPATSGSETPGTSESATPESGPGSPAGSPTSTEEGSPAGSPTSTEEGTSTEPSEGSAPGTSESATPESGPGTSESATPESGPGTSESATPESGPGSEPATSGSETPGSEPATSGSETPGSPAGSPTSTEEGTSTEPSEGSAP

SEQ ID NO: 848 - protein, 875 aa, Artificial Sequence; identical to SEQ ID NO: 79
  Description of Artificial Sequence: Synthetic polypeptide
  MOD_RES (430)..(432): Any amino acid
  MOD_RES (443)..(446): Any amino acid

SEQ ID NO: 849 - protein, 864 aa, Artificial Sequence; identical to SEQ ID NO: 80
  Description of Artificial Sequence: Synthetic polypeptide

SEQ ID NO: 850 - protein, 868 aa, Artificial Sequence
  Description of Artificial Sequence: Synthetic polypeptide
GGSPGASPGTSSTGSPGSSPSASTGTGPGSSPSASTGTGPGTPGSGTASSSPGSSTPSGATGSPGSNPSASTGTGPGASPGTSSTGSPGTPGSGTASSSPGSSTPSGATGSPGTPGSGTASSSPGASPGTSSTGSPGASPGTSSTGSPGTPGSGTASSSPGSSTPSGATGSPGASPGTSSTGSPGTPGSGTASSSPGSSTPSGATGSPGSNPSASTGTGPGSSPSASTGTGPGSSTPSGATGSPGSSTPSGATGSPGASPGTSSTGSPGASPGTSSTGSPGASPGTSSTGSPGTPGSGTASSSPGASPGTSSTGSPGASPGTSSTGSPGASPGTSSTGSPGSSPSASTGTGPGTPGSGTASSSPGASPGTSSTGSPGASPGTSSTGSPGASPGTSSTGSPGSSTPSGATGSPGSSTPSGATGSPGASPGTSSTGSPGTPGSGTASSSPGSSTPSGATGSPGSSTPSGATGSPGSSTPSGATGSPGSSPSASTGTGPGASPGTSSTGSPGASPGTSSTGSPGTPGSGTASSSPGASPGTSSTGSPGASPGTSSTGSPGASPGTSSTGSPGASPGTSSTGSPGTPGSGTASSSPGSSTPSGATGSPGTPGSGTASSSPGSSTPSGATGSPGTPGSGTASSSPGSSTPSGATGSPGSSTPSGATGSPGSSPSASTGTGPGSSPSASTGTGPGASPGTSSTGSPGTPGSGTASSSPGSSTPSGATGSPGSSPSASTGTGPGSSPSASTGTGPGASPGTSSTGSPGASPGTSSTGSPGSSTPSGATGSPGSSPSASTGTGPGASPGTSSTGSPGSSPSASTGTGPGTPGSGTASSSPGSSTPSGATGSPGSSTPSGATGSPGASPGTSSTGSP

SEQ ID NO: 851 - protein, 875 aa, Artificial Sequence; identical to SEQ ID NO: 81
  Description of Artificial Sequence: Synthetic polypeptide

SEQ ID NO: 852 - protein, 913 aa, Artificial Sequence; identical to SEQ ID NO: 82
  Description of Artificial Sequence: Synthetic polypeptide

SEQ ID NO: 853 - protein, 924 aa, Artificial Sequence; identical to SEQ ID NO: 83
  Description of Artificial Sequence: Synthetic polypeptide

SEQ ID NO: 854 - protein, 1318 aa, Artificial Sequence; identical to SEQ ID NO: 84
  Description of Artificial Sequence: Synthetic polypeptide

SEQ ID NO: 855 - protein, 9 aa, Artificial Sequence
  Description of Artificial Sequence: Synthetic peptide
FDKLPRTSG

SEQ ID NO: 856 - protein, 7 aa, Artificial Sequence
  Description of Artificial Sequence: Synthetic peptide
FKLMVWY

SEQ ID NO: 857 - protein, 2477 aa, Artificial Sequence
  Description of Artificial Sequence: Synthetic polypeptide
ATRRYYLGAVELSWDYMQSDLGELPVDARFPPRVPKSFPFNTSVVYKKTLFVEFTDHLFNIAKPRPPWMGLLGPTIQAEVYDTVVITLKNMASHPVSLHAVGVSYWKASEGAEYDDQTSQREKEDDKVFPGGSHTYVWQVLKENGPMASDPLCLTYSYLSHVDLVKDLNSGLIGALLVCREGSLAKEKTQTLHKFILLFAVFDEGKSWHSETKNSLMQDRDAASARAWPKMHTVNGYVNRSLPGLIGCHRKSVYWHVIGMGTTPEVHSIFLEGHTFLVRNHRQASLEISPITFLTAQTLLMDLGQFLLFCHISSHQHDGMEAYVKVDSCPEEPQLRMKNNEEAEDYDDDLTDSEMDVVRFDDDNSPSFIQIRSVAKKHPKTWVHYIAAEEEDWDYAPLVLAPDDRSYKSQYLNNGPQRIGRKYKKVRFMAYTDETFKTREAIQHESGILGPLLYGEVGDTLLIIFKNQASRPYNIYPHGITDVRPLYSRRLPKGVKHLKDFPILPGEIFKYKWTVTVEDGPTKSDPRCLTRYYSSFVNMERDLASGLIGPLLICYKESVDQRGNQIMSDKRNVILFSVFDENRSWYLTENIQRFLPNPAGVQLEDPEFQASNIMHSINGYVFDSLQLSVCLHEVAYWYILSIGAQTDFLSVFFSGYTFKHKMVYEDTLTLFPFSGETVFMSMENPGLWILGCHNSDFRNRGMTALLKVSSCDKNTGDYYEDSYEDISAYLLSKNNAIEPRSFSQNSRHPSTRQKQFNATTIPENDIEKTDPWFAHRTPMPKIQNVSSSDLLMLLRQSPTPHGLSLSDLQEAKYETFSDDPSPGAIDSNNSLSEMTHFRPQLHHSGDMVFTPESGLQLRLNEKLGTTAATELKKLDFKVSSTSNNLISTIPSDNLAAGTDNTSSLGPPSMPVHYDSQLDTTLFGKKSSPLTESGGPLSLSEENNDSKLLESGLMNSQESSWGKNVSSTESGRLFKGKRAHGPALLTKDNALFKVSISLLKTNKTSNNSATNRKTHIDGPSLLIENSPSVWQNILESDTEFKKVTPLIHDRMLMDKNATALRLNHMSNKTTSSKNMEMVQQKKEGPIPPDAQNPDMSFFKMLFLPESARWIQRTHGKNSLNSGQGPSPKQLVSLGPEKSVEGQNFLSEKNKVVVGKGEFTKDVGLKEMVFPSSRNLFLTNLDNLHENNTHNQEKKIQEEIEKKETLIQENVVLPQIHTVTGTKNFMKNLFLLSTRQNVEGSYDGAYAPVLQDFRSLNDSTNRTKKHTAHFSKKGEEENLEGLGNQTKQIVEKYACTTRISPNTSQQNFVTQRSKRALKQFRLPLEETELEKRIIVDDTSTQWSKNMKHLTPSTLTQIDYNEKEKGAITQSPLSDCLTRSHSIPQANRSPLPIAKVSSFPSIRPIYLTRVLFQDNSSHLPAASYRKKDSGVQESSHFLQGAKKNNLSLAILTLEMTGDQREVGSLGTSATNSVTYKKVENTVLPKPDLPKTSGKVELLPKVHIYQKDLFPTETSNGSPGHLDLVEGSLLQGTEGAIKWNEANRPGKVPFLRVATESSAKTPSKLLDPLAWDNHYGTQIPKEEWKSQEKSPEKTAFKKKDTILSLNACESNHAIAAINEGQNKPEIEVTWAKQGRTERLCSQNPPVLKRHQREITRTTLQSDQEEIDYDDTISVEMKKEDFDIYDEDENQSPRSFQKKTRHYFIAAVERLWDYGMSSSPHVLRNRAQSGSVPQFKKVVFQEFTDGSFTQPLYRGELNEHLGLLGPYIRAEVEDNIMVTFRNQASRPYSFYSSLISYEEDQRQGAEPRKNFVKPNETKTYFWKVQHHMAPTKDEFDCKAWAYFSDVDLEKDVHSGLIGPLLVCHTNTLNPAHGRQVTVQEFALFFTIFDETKSWYFTENMERNCRAPCNIQMEDPTFKENYRFHAINGYIMDTLPGLVMAQDQRIRWYLLSMGSNENIHSIHFSGHVFTVRKKEEYKMALYNLYPGVFETVEMLPSKAGIWRVECLIGEHLHAGMSTLFLVYSNKCQTPLGMASGHIRDFQITASGQYGQWAPKLARLHYSGSINAWSTKEPFSWIKVDLLAPMIIHGIKTQGARQKFSSLYISQFIIMYSLDGKKWQTYRGNSTGTLMVFFGNVDSSGIKHNIFNPPIIARYIRLHPTHYSIRSTLRMELMGCDLNSCSMPLGMESKAISDAQITASSYFTNMFATWSPSKARLHLQGRSNAWRPQVNNPKEWLQVDFQKTMKVTGVTTQGVKSLLTSMYVKEFLISSSQDGHQWTLFFQNGKVKVFQGNQDSFTPVVNSLDPPLLTRYLRIHPQSWVHQIALRMEVLGCEAQDLYGGSEPATSGSETPGTSESATPESGPGSEPATSGSETPGSPAGSPTSTEEGTSTEPSEGSAPGSEPATSGSETPGSEPATSGSETPGSEPATSGSETPGTSTEPSEGSAPGTSESATPESGPGSEPATSGSETPGTSTEPSEGSAP

SEQ ID NO: 858 - protein, 1583 aa, Artificial Sequence
  Description of Artificial Sequence: Synthetic polypeptide
ATRRYYLGAVELSWDYMQSDLGELPVDARFPPRVPKSFPFNTSVVYKKTLFVEFTVHLFNIAKPRPPWMGLLGPTIQAEVYDTVVITLKNMASHPVSLHAVGVSYWKASEGAEYDDQTSQREKEDDKVFPGGSHTYVWQVLKENGPMASDPLCLTYSYLSHVDLVKDLNSGLIGALLVCREGSLAKEKTQTLHKFILLFAVFDEGKSWHSETKNSLMQDRDAASARAWPKMHTVNGYVNRSLPGLIGCHRKSVYWHVIGMGTTPEVHSIFLEGHTFLVRNHRQASLEISPITFLTAQTLLMDLGQFLLFCHISSHQHDGMEAYVKVDSCPEEPQLRMKNNEEAEDYDDDLTDSEMDVVRFDDDNSPSFIQIRSVAKKHPKTWVHYIAAEEEDWDYAPLVLAPDDRSYKSQYLNNGPQRIGRKYKKVRFMAYTDETFKTREAIQHESGILGPLLYGEVGDTLLIIFKNQASRPYNIYPHGITDVRPLYSRRLPKGVKHLKDFPILPGEIFKYKWTVTVEDGPTKSDPRCLTRYYSSFVNMERDLASGLIGPLLICYKESVDQRGNQIMSDKRNVILFSVFDENRSWYLTENIQRFLPNPAGVQLEDPEFQASNIMHSINGYVFDSLQLSVCLHEVAYWYILSIGAQTDFLSVFFSGYTFKHKMVYEDTLTLFPFSGETVFMSMENPGLWILGCHNSDFRNRGMTALLKVSSCDKNTGDYYEDSYEDISAYLLSKNNAIEPRSFSQNPPVLKRHQREITRTTLQSDQEEIDYDDTISVEMKKEDFDIYDEDENQSPRSFQKKTRHYFIAAVERLWDYGMSSSPHVLRNRAQSGSVPQFKKVVFQEFTDGSFTQPLYRGELNEHLGLLGPYIRAEVEDNIMVTFRNQASRPYSFYSSLISYEEDQRQGAEPRKNFVKPNETKTYFWKVQHHMAPTKDEFDCKAWAYFSDVDLEKDVHSGLIGPLLVCHTNTLNPAHGRQVTVQEFALFFTIFDETKSWYFTENMERNCRAPCNIQMEDPTFKENYRFHAINGYIMDTLPGLVMAQDQRIRWYLLSMGSNENIHSIHFSGHVFTVRKKEEYKMALYNLYPGVFETVEMLPSKAGIWRVECLIGEHLHAGMSTLFLVYSNKCQTPLGMASGHIRDFQITASGQYGQWAPKLARLHYSGSINAWSTKEPFSWIKVDLLAPMIIHGIKTQGARQKFSSLYISQFIIMYSLDGKKWQTYRGNSTGTLMVFFGNVDSSGIKHNIFNPPIIARYIRLHPTHYSIRSTLRMELMGCDLNSCSMPLGMESKAISDAQITASSYFTNMFATWSPSKARLHLQGRSNAWRPQVNNPKEWLQVDFQKTMKVTGVTTQGVKSLLTSMYVKEFLISSSQDGHQWTLFFQNGKVKVFQGNQDSFTPVVNSLDPPLLTRYLRIHPQSWVHQIALRMEVLGCEAQDLYGGSEPATSGSETPGTSESATPESGPGSEPATSGSETPGSPAGSPTSTEEGTSTEPSEGSAPGSEPATSGSETPGSEPATSGSETPGSEPATSGSETPGTSTEPSEGSAPGTSESATPESGPGSEPATSGSETPGTSTEPSEGSAP

SEQ ID NO: 859 - protein, 1583 aa, Artificial Sequence
  Description of Artificial Sequence: Synthetic polypeptide
ATRRYYLGAVELSWDYMQSDLGELPVDARFPPRVPKSFPFNTSVVYKKTLFVEFTVHLFNIAKPRPPWMGLLGPTIQAEVYDTVVITLKNMASHPVSLHAVGVSYWKASEGAEYDDQTSQREKEDDKVFPGGSHTYVWQVLKENGPMASDPLCLTYSYLSHVDLVKDLNSGLIGALLVCREGSLAKEKTQTLHKFILLFAVFDEGKSWHSETKNSLMQDRDAASARAWPKMHTVNGYVNRSLPGLIGCHRKSVYWHVIGMGTTPEVHSIFLEGHTFLVRNHRQASLEISPITFLTAQTLLMDLGQFLLFCHISSHQHDGMEAYVKVDSCPEEPQLRMKNNEEAEDYDDDLTDSEMDVVRFDDDNSPSFIQIRSVAKKHPKTWVHYIAAEEEDWDYAPLVLAPDDRSYKSQYLNNGPQRIGRKYKKVRFMAYTDETFKTREAIQHESGILGPLLYGEVGDTLLIIFKNQASRPYNIYPHGITDVRPLYSRRLPKGVKHLKDFPILPGEIFKYKWTVTVEDGPTKSDPRCLTRYYSSFVNMERDLASGLIGPLLICYKESVDQRGNQIMSDKRNVILFSVFDENRSWYLTENIQRFLPNPAGVQLEDPEFQASNIMHSINGYVFDSLQLSVCLHEVAYWYILSIGAQTDFLSVFFSGYTFKHKMVYEDTLTLFPFSGETVFMSMENPGLWILGCHNSDFRNRGMTALLKVSSCDKNTGDYYEDSYEDISAYLLSKNNAIEPRSFSQNPPVLKRHQREITRTTLQSDQEEIDYDDTISVEMKKEDFDIYDEDENQSPRSFQKKTRHYFIAAVERLWDYGMSSSPHVLRNRAQSGSVPQFKKVVFQEFTDGSFTQPLYRGELNEHLGLLGPYIRAEVEDNIMVTFRNQASRPYSFYSSLISYEEDQRQGAEPRKNFVKPNETKTYFWKVQHHMAPTKDEFDCKAWAYFSDVDLEKDVHSGLIGPLLVCHTNTLNPAHGRQVTVQEFALFFTIFDETKSWYFTENMERNCRAPCNIQMEDPTFKENYRFHAINGYIMDTLPGLVMAQDQRIRWYLLSMGSNENIHSIHFSGHVFTVRKKEEYKMALYNLYPGVFETVEMLPSKAGIWRVECLIGEHLHAGMSTLFLVYSNKCQTPLGMASGHIRDFQITASGQYGQWAPKLARLHYSGSINAWSTKEPFSWIKVDLLAPMIIHGIKTQGARQKFSSLYISQFIIMYSLDGKKWQTYRGNSTGTLMVFFGNVDSSGIKHNIFNPPIIARYIRLHPTHYSIRSTLRMELMGCDLNSCSMPLGMESKAISDAQITASSYFTNMFATWSPSKARLHLQGRSNAWRPQVNNPKEWLQVDFQKTMKVTGVTTQGVKSLLTSMYVKEFLISSSQDGHQWTLFFQNGKVKVFQGNQDSFTPVVNSLDPPLLTRYLRIHPQSWVHQIALRMEVLGCEAQDLYGPGSSPSASTGTGPGSSPSASTGTGPGTPGSGTASSSPGSSTPSGATGSPGSSPSASTGTGPGASPGTSSTGSPGTPGSGTASSSPGSSTPSGATGSPGTPGSGTASSSPGASPGTSSTGSPGASPGTSSTGSPGTPGSGTASSS

SEQ ID NO: 860 - protein, 2621 aa, Artificial Sequence
  Description of Artificial Sequence: Synthetic polypeptide
ATRRYYLGAVELSWDYMQSDLGELPVDARFPPRVPKSFPFNTSVVYKKTLFVEFTDHLFNIAKPRPPWMGLLGPTIQAEVYDTVVITLKNMASHPVSLHAVGVSYWKASEGAEYDDQTSQREKEDDKVFPGGSHTYVWQVLKENGPMASDPLCLTYSYLSHVDLVKDLNSGLIGALLVCREGSLAKEKTQTLHKFILLFAVFDEGKSWHSETKNSLMQDRDAASARAWPKMHTVNGYVNRSLPGLIGCHRKSVYWHVIGMGTTPEVHSIFLEGHTFLVRNHRQASLEISPITFLTAQTLLMDLGQFLLFCHISSHQHDGMEAYVKVDSCPEEPQLRMKNNEEAEDYDDDLTDSEMDVVRFDDDNSPSFIQIRSVAKKHPKTWVHYIAAEEEDWDYAPLVLAPDDRSYKSQYLNNGPQRIGRKYKKVRFMAYTDETFKTREAIQHESGILGPLLYGEVGDTLLIIFKNQASRPYNIYPHGITDVRPLYSRRLPKGVKHLKDFPILPGEIFKYKWTVTVEDGPTKSDPRCLTRYYSSFVNMERDLASGLIGPLLICYKESVDQRGNQIMSDKRNVILFSVFDENRSWYLTENIQRFLPNPAGVQLEDPEFQASNIMHSINGYVFDSLQLSVCLHEVAYWYILSIGAQTDFLSVFFSGYTFKHKMVYEDTLTLFPFSGETVFMSMENPGLWILGCHNSDFRNRGMTALLKVSSCDKNTGDYYEDSYEDISAYLLSKNNAIEPRSFSQNSRHPSTRQKQFNATTIPENDIEKTDPWFAHRTPMPKIQNVSSSDLLMLLRQSPTPHGLSLSDLQEAKYETFSDDPSPGAIDSNNSLSEMTHFRPQLHHSGDMVFTPESGLQLRLNEKLGTTAATELKKLDFKVSSTSNNLISTIPSDNLAAGTDNTSSLGPPSMPVHYDSQLDTTLFGKKSSPLTESGGPLSLSEENNDSKLLESGLMNSQESSWGKNVSSTESGRLFKGKRAHGPALLTKDNALFKVSISLLKTNKTSNNSATNRKTHIDGPSLLIENSPSVWQNILESDTEFKKVTPLIHDRMLMDKNATALRLNHMSNKTTSSKNMEMVQQKKEGPIPPDAQNPDMSFFKMLFLPESARWIQRTHGKNSLNSGQGPSPKQLVSLGPEKSVEGQNFLSEKNKVVVGKGEFTKDVGLKEMVFPSSRNLFLTNLDNLHENNTHNQEKKIQEEIEKKETLIQENVVLPQIHTVTGTKNFMKNLFLLSTRQNVEGSYDGAYAPVLQDFRSLNDSTNRTKKHTAHFSKKGEEENLEGLGNQTKQIVEKYACTTRISPNTSQQNFVTQRSKRALKQFRLPLEETELEKRIIVDDTSTQWSKNMKHLTPSTLTQIDYNEKEKGAITQSPLSDCLTRSHSIPQANRSPLPIAKVSSFPSIRPIYLTRVLFQDNSSHLPAASYRKKDSGVQESSHFLQGAKKNNLSLAILTLEMTGDQREVGSLGTSATNSVTYKKVENTVLPKPDLPKTSGKVELLPKVHIYQKDLFPTETSNGSPGHLDLVEGSLLQGTEGAIKWNEANRPGKVPFLRVATESSAKTPSKLLDPLAWDNHYGTQIPKEEWKSQEKSPEKTAFKKKDTILSLNACESNHAIAAINEGQNKPEIEVTWAKQGRTERLCSQNPPVLKRHQREITRTTLQSDQEEIDYDDTISVEMKKEDFDIYDEDENQSPRSFQKKTRHYFIAAVERLWDYGMSSSPHVLRNRAQSGSVPQFKKVVFQEFTDGSFTQPLYRGELNEHLGLLGPYIRAEVEDNIMVTFRNQASRPYSFYSSLISYEEDQRQGAEPRKNFVKPNETKTYFWKVQHHMAPTKDEFDCKAWAYFSDVDLEKDVHSGLIGPLLVCHTNTLNPAHGRQVTVQEFALFFTIFDETKSWYFTENMERNCRAPCNIQMEDPTFKENYRFHAINGYIMDTLPGLVMAQDQRIRWYLLSMGSNENIHSIHFSGHVFTVRKKEEYKMALYNLYPGVFETVEMLPSKAGIWRVECLIGEHLHAGMSTLFLVYSNKCQTPLGMASGHIRDFQITASGQYGQWAPKLARLHYSGSINAWSTKEPFSWIKVDLLAPMIIHGIKTQGARQKFSSLYISQFIIMYSLDGKKWQTYRGNSTGTLMVFFGNVDSSGIKHNIFNPPIIARYIRLHPTHYSIRSTLRMELMGCDLNSCSMPLGMESKAISDAQITASSYFTNMFATWSPSKARLHLQGRSNAWRPQVNNPKEWLQVDFQKTMKVTGVTTQGVKSLLTSMYVKEFLISSSQDGHQWTLFFQNGKVKVFQGNQDSFTPVVNSLDPPLLTRYLRIHPQSWVHQIALRMEVLGCEAQDLYGGTSESATPESGPGSEPATSGSETPGTSESATPESGPGSEPATSGSETPGTSESATPESGPGTSTEPSEGSAPGSPAGSPTSTEEGTSESATPESGPGSEPATSGSETPGTSESATPESGPGSPAGSPTSTEEGSPAGSPTSTEEGTSTEPSEGSAPGTSESATPESGPGTSESATPESGPGTSESATPESGPGSEPATSGSETPGSEPATSGSETPGSPAGSPTSTEEGTSTEPSEGSAPGTSTEPSEGSAPGSEPATSGSETPGTSESATPESGPGTSTEPSEGSAP

SEQ ID NO: 861 - protein, 2909 aa, Artificial Sequence
  Description of Artificial Sequence: Synthetic polypeptide
ATRRYYLGAVELSWDYMQSDLGELPVDARFPPRVPKSFPFNTSVVYKKTLFVEFTDHLFNIAKPRPPWMGLLGPTIQAEVYDTVVITLKNMASHPVSLHAVGVSYWKASEGAEYDDQTSQREKEDDKVFPGGSHTYVWQVLKENGPMASDPLCLTYSYLSHVDLVKDLNSGLIGALLVCREGSLAKEKTQTLHKFILLFAVFDEGKSWHSETKNSLMQDRDAASARAWPKMHTVNGYVNRSLPGLIGCHRKSVYWHVIGMGTTPEVHSIFLEGHTFLVRNHRQASLEISPITFLTAQTLLMDLGQFLLFCHISSHQHDGMEAYVKVDSCPEEPQLRMKNNEEAEDYDDDLTDSEMDVVRFDDDNSPSFIQIRSVAKKHPKTWVHYIAAEEEDWDYAPLVLAPDDRSYKSQYLNNGPQRIGRKYKKVRFMAYTDETFKTREAIQHESGILGPLLYGEVGDTLLIIFKNQASRPYNIYPHGITDVRPLYSRRLPKGVKHLKDFPILPGEIFKYKWTVTVEDGPTKSDPRCLTRYYSSFVNMERDLASGLIGPLLICYKESVDQRGNQIMSDKRNVILFSVFDENRSWYLTENIQRFLPNPAGVQLEDPEFQASNIMHSINGYVFDSLQLSVCLHEVAYWYILSIGAQTDFLSVFFSGYTFKHKMVYEDTLTLFPFSGETVFMSMENPGLWILGCHNSDFRNRGMTALLKVSSCDKNTGDYYEDSYEDISAYLLSKNNAIEPRSFSQNSRHPSTRQKQFNATTIPENDIEKTDPWFAHRTPMPKIQNVSSSDLLMLLRQSPTPHGLSLSDLQEAKYETFSDDPSPGAIDSNNSLSEMTHFRPQLHHSGDMVFTPESGLQLRLNEKLGTTAATELKKLDFKVSSTSNNLISTIPSDNLAAGTDNTSSLGPPSMPVHYDSQLDTTLFGKKSSPLTESGGPLSLSEENNDSKLLESGLMNSQESSWGKNVSSTESGRLFKGKRAHGPALLTKDNALFKVSISLLKTNKTSNNSATNRKTHIDGPSLLIENSPSVWQNILESDTEFKKVTPLIHDRMLMDKNATALRLNHMSNKTTSSKNMEMVQQKKEGPIPPDAQNPDMSFFKMLFLPESARWIQRTHGKNSLNSGQGPSPKQLVSLGPEKSVEGQNFLSEKNKVVVGKGEFTKDVGLKEMVFPSSRNLFLTNLDNLHENNTHNQEKKIQEEIEKKETLIQENVVLPQIHTVTGTKNFMKNLFLLSTRQNVEGSYDGAYAPVLQDFRSLNDSTNRTKKHTAHFSKKGEEENLEGLGNQTKQIVEKYACTTRISPNTSQQNFVTQRSKRALKQFRLPLEETELEKRIIVDDTSTQWSKNMKHLTPSTLTQIDYNEKEKGAITQSPLSDCLTRSHSIPQANRSPLPIAKVSSFPSIRPIYLTRVLFQDNSSHLPAASYRKKDSGVQESSHFLQGAKKNNLSLAILTLEMTGDQREVGSLGTSATNSVTYKKVENTVLPKPDLPKTSGKVELLPKVHIYQKDLFPTETSNGSPGHLDLVEGSLLQGTEGAIKWNEANRPGKVPFLRVATESSAKTPSKLLDPLAWDNHYGTQIPKEEWKSQEKSPEKTAFKKKDTILSLNACESNHAIAAINEGQNKPEIEVTWAKQGRTERLCSQNPPVLKRHQREITRTTLQSDQEEIDYDDTISVEMKKEDFDIYDEDENQSPRSFQKKTRHYFIAAVERLWDYGMSSSPHVLRNRAQSGSVPQFKKVVFQEFTDGSFTQPLYRGELNEHLGLLGPYIRAEVEDNIMVTFRNQASRPYSFYSSLISYEEDQRQGAEPRKNFVKPNETKTYFWKVQHHMAPTKDEFDCKAWAYFSDVDLEKDVHSGLIGPLLVCHTNTLNPAHGRQVTVQEFALFFTIFDETKSWYFTENMERNCRAPCNIQMEDPTFKENYRFHAINGYIMDTLPGLVMAQDQRIRWYLLSMGSNENIHSIHFSGHVFTVRKKEEYKMALYNLYPGVFETVEMLPSKAGIWRVECLIGEHLHAGMSTLFLVYSNKCQTPLGMASGHIRDFQITASGQYGQWAPKLARLHYSGSINAWSTKEPFSWIKVDLLAPMIIHGIKTQGARQKFSSLYISQFIIMYSLDGKKWQTYRGNSTGTLMVFFGNVDSSGIKHNIFNPPIIARYIRLHPTHYSIRSTLRMELMGCDLNSCSMPLGMESKAISDAQITASSYFTNMFATWSPSKARLHLQGRSNAWRPQVNNPKEWLQVDFQKTMKVTGVTTQGVKSLLTSMYVKEFLISSSQDGHQWTLFFQNGKVKVFQGNQDSFTPVVNSLDPPLLTRYLRIHPQSWVHQIALRMEVLGCEAQDLYGGSPAGSPTSTEEGTSESATPESGPGTSTEPSEGSAPGSPAGSPTSTEEGTSTEPSEGSAPGTSTEPSEGSAPGTSESATPESGPGSEPATSGSETPGSEPATSGSETPGSPAGSPTSTEEGTSESATPESGPGTSTEPSEGSAPGTSTEPSEGSAPGSPAGSPTSTEEGTSTEPSEGSAPGTSTEPSEGSAPGTSESATPESGPGTSTEPSEGSAPGTSESATPESGPGSEPATSGSETPGTSTEPSEGSAPGTSTEPSEGSAPGTSESATPESGPGTSESATPESGPGSPAGSPTSTEEGTSESATPESGPGSEPATSGSETPGTSESATPESGPGTSTEPSEGSAPGTSTEPSEGSAPGTSTEPSEGSAPGTSTEPSEGSAPGTSTEPSEGSAPGTSTEPSEGSAPGSPAGSPTSTEEGTSTEPSEGSAPGTSESATPESGPGSEPATSGSETPGTSESATPESGPGSEPATSGSETPGTSESATPESGPGTSTEPSEGSAPGTSESATPESGPGSPAGSPTSTEEGSPAGSPTSTEEGSPAGSPTSTEEGTSESATPESGPGTSTEPSEGSAP

SEQ ID NO: 862 - protein, 2909 aa, Artificial Sequence
  Description of Artificial Sequence: Synthetic polypeptide
ATRRYYLGAVELSWDYMQSDLGELPVDARFPPRVPKSFPFNTSVVYKKTLFVEFTDHLFNIAKPRPPWMGLLGPTIQAEVYDTVVITLKNMASHPVSLHAVGVSYWKASEGAEYDDQTSQREKEDDKVFPGGSHTYVWQVLKENGPMASDPLCLTYSYLSHVDLVKDLNSGLIGALLVCREGSLAKEKTQTLHKFILLFAVFDEGKSWHSETKNSLMQDRDAASARAWPKMHTVNGYVNRSLPGLIGCHRKSVYWHVIGMGTTPEVHSIFLEGHTFLVRNHRQASLEISPITFLTAQTLLMDLGQFLLFCHISSHQHDGMEAYVKVDSCPEEPQLRMKNNEEAEDYDDDLTDSEMDVVRFDDDNSPSFIQIRSVAKKHPKTWVHYIAAEEEDWDYAPLVLAPDDRSYKSQYLNNGPQRIGRKYKKVRFMAYTDETFKTREAIQHESGILGPLLYGEVGDTLLIIFKNQASRPYNIYPHGITDVRPLYSRRLPKGVKHLKDFPILPGEIFKYKWTVTVEDGPTKSDPRCLTRYYSSFVNMERDLASGLIGPLLICYKESVDQRGNQIMSDKRNVILFSVFDENRSWYLTENIQRFLPNPAGVQLEDPEFQASNIMHSINGYVFDSLQLSVCLHEVAYWYILSIGAQTDFLSVFFSGYTFKHKMVYEDTLTLFPFSGETVFMSMENPGLWILGCHNSDFRNRGMTALLKVSSCDKNTGDYYEDSYEDISAYLLSKNNAIEPRSFSQNSRHPSTRQKQFNATTIPENDIEKTDPWFAHRTPMPKIQNVSSSDLLMLLRQSPTPHGLSLSDLQEAKYETFSDDPSPGAIDSNNSLSEMTHFRPQLHHSGDMVFTPESGLQLRLNEKLGTTAATELKKLDFKVSSTSNNLISTIPSDNLAAGTDNTSSLGPPSMPVHYDSQLDTTLFGKKSSPLTESGGPLSLSEENNDSKLLESGLMNSQESSWGKNVSSTESGRLFKGKRAHGPALLTKDNALFKVSISLLKTNKTSNNSATNRKTHIDGPSLLIENSPSVWQNILESDTEFKKVTPLIHDRMLMDKNATALRLNHMSNKTTSSKNMEMVQQKKEGPIPPDAQNPDMSFFKMLFLPESARWIQRTHGKNSLNSGQGPSPKQLVSLGPEKSVEGQNFLSEKNKVVVGKGEFTKDVGLKEMVFPSSRNLFLTNLDNLHENNTHNQEKKIQEEIEKKETLIQENVVLPQIHTVTGTKNFMKNLFLLSTRQNVEGSYDGAYAPVLQDFRSLNDSTNRTKKHTAHFSKKGEEENLEGLGNQTKQIVEKYACTTRISPNTSQQNFVTQRSKRALKQFRLPLEETELEKRIIVDDTSTQWSKNMKHLTPSTLTQIDYNEKEKGAITQSPLSDCLTRSHSIPQANRSPLPIAKVSSFPSIRPIYLTRVLFQDNSSHLPAASYRKKDSGVQESSHFLQGAKKNNLSLAILTLEMTGDQREVGSLGTSATNSVTYKKVENTVLPKPDLPKTSGKVELLPKVHIYQKDLFPTETSNGSPGHLDLVEGSLLQGTEGAIKWNEANRPGKVPFLRVATESSAKTPSKLLDPLAWDNHYGTQIPKEEWKSQEKSPEKTAFKKKDTILSLNACESNHAIAAINEGQNKPEIEVTWAKQGRTERLCSQNPPVLKRHQREITRTTLQSDQEEIDYDDTISVEMKKEDFDIYDEDENQSPRSFQKKTRHYFIAAVERLWDYGMSSSPHVLRNRAQSGSVPQFKKVVFQEFTDGSFTQPLYRGELNEHLGLLGPYIRAEVEDNIMVTFRNQASRPYSFYSSLISYEEDQRQGAEPRKNFVKPNETKTYFWKVQHHMAPTKDEFDCKAWAYFSDVDLEKDVHSGLIGPLLVCHTNTLNPAHGRQVTVQEFALFFTIFDETKSWYFTENMERNCRAPCNIQMEDPTFKENYRFHAINGYIMDTLPGLVMAQDQRIRWYLLSMGSNENIHSIHFSGHVFTVRKKEEYKMALYNLYPGVFETVEMLPSKAGIWRVECLIGEHLHAGMSTLFLVYSNKCQTPLGMASGHIRDFQITASGQYGQWAPKLARLHYSGSINAWSTKEPFSWIKVDLLAPMIIHGIKTQGARQKFSSLYISQFIIMYSLDGKKWQTYRGNSTGTLMVFFGNVDSSGIKHNIFNPPIIARYIRLHPTHYSIRSTLRMELMGCDLNSCSMPLGMESKAISDAQITASSYFTNMFATWSPSKARLHLQGRSNAWRPQVNNPKEWLQVDFQKTMKVTGVTTQGVKSLLTSMYVKEFLISSSQDGHQWTLFFQNGKVKVFQGNQDSFTPVVNSLDPPLLTRYLRIHPQSWVHQIALRMEVLGCEAQDLYGGSTSSTAESPGPGSTSSTAESPGPGSTSESPSGTAPGSTSSTAESPGPGSTSSTAESPGPGTSTPESGSASPGSTSESPSGTAPGTSPSGESSTAPGSTSESPSGTAPGSTSESPSGTAPGTSPSGESSTAPGSTSESPSGTAPGSTSESPSGTAPGTSPSGESSTAPGSTSESPSGTAPGSTSESPSGTAPGSTSESPSGTAPGTSTPESGSASPGSTSESPSGTAPGTSTPESGSASPGSTSSTAESPGPGSTSSTAESPGPGTSTPESGSASPGTSTPESGSASPGSTSESPSGTAPGTSTPESGSASPGTSTPESGSASPGSTSESPSGTAPGSTSESPSGTAPGSTSESPSGTAPGSTSSTAESPGPGTSTPESGSASPGTSTPESGSASPGSTSESPSGTAPGSTSESPSGTAPGTSTPESGSASPGSTSESPSGTAPGSTSESPSGTAPGTSTPESGSASPGTSPSGESSTAPGSTSSTAESPGPGTSPSGESSTAPGSTSSTAESPGPGTSTPESGSASPGSTSESPSGTAPGSTSSTAESPGPGTSTPESGSASPGTSTPESGSASP

SEQ ID NO: 863 - protein, 3197 aa, Artificial Sequence
  Description of Artificial Sequence: Synthetic polypeptide
ATRRYYLGAVELSWDYMQSDLGELPVDARFPPRVPKSFPFNTSVVYKKTLFVEFTDHLFNIAKPRPPWMGLLGPTIQAEVYDTVVITLKNMASHPVSLHAVGVSYWKASEGAEYDDQTSQREKEDDKVFPGGSHTYVWQVLKENGPMASDPLCLTYSYLSHVDLVKDLNSGLIGALLVCREGSLAKEKTQTLHKFILLFAVFDEGKSWHSETKNSLMQDRDAASARAWPKMHTVNGYVNRSLPGLIGCHRKSVYWHVIGMGTTPEVHSIFLEGHTFLVRNHRQASLEISPITFLTAQTLLMDLGQFLLFCHISSHQHDGMEAYVKVDSCPEEPQLRMKNNEEAEDYDDDLTDSEMDVVRFDDDNSPSFIQIRSVAKKHPKTWVHYIAAEEEDWDYAPLVLAPDDRSYKSQYLNNGPQRIGRKYKKVRFMAYTDETFKTREAIQHESGILGPLLYGEVGDTLLIIFKNQASRPYNIYPHGITDVRPLYSRRLPKGVKHLKDFPILPGEIFKYKWTVTVEDGPTKSDPRCLTRYYSSFVNMERDLASGLIGPLLICYKESVDQRGNQIMSDKRNVILFSVFDENRSWYLTENIQRFLPNPAGVQLEDPEFQASNIMHSINGYVFDSLQLSVCLHEVAYWYILSIGAQTDFLSVFFSGYTFKHKMVYEDTLTLFPFSGETVFMSMENPGLWILGCHNSDFRNRGMTALLKVSSCDKNTGDYYEDSYEDISAYLLSKNNAIEPRSFSQNSRHPSTRQKQFNATTIPENDIEKTDPWFAHRTPMPKIQNVSSSDLLMLLRQSPTPHGLSLSDLQEAKYETFSDDPSPGAIDSNNSLSEMTHFRPQLHHSGDMVFTPESGLQLRLNEKLGTTAATELKKLDFKVSSTSNNLISTIPSDNLAAGTDNTSSLGPPSMPVHYDSQLDTTLFGKKSSPLTESGGPLSLSEENNDSKLLESGLMNSQESSWGKNVSSTESGRLFKGKRAHGPALLTKDNALFKVSISLLKTNKTSNNSATNRKTHIDGPSLLIENSPSVWQNILESDTEFKKVTPLIHDRMLMDKNATALRLNHMSNKTTSSKNMEMVQQKKEGPIPPDAQNPDMSFFKMLFLPESARWIQRTHGKNSLNSGQGPSPKQLVSLGPEKSVEGQNFLSEKNKVVVGKGEFTKDVGLKEMVFPSSRNLFLTNLDNLHENNTHNQEKKIQEEIEKKETLIQENVVLPQIHTVTGTKNFMKNLFLLSTRQNVEGSYDGAYAPVLQDFRSLNDSTNRTKKHTAHFSKKGEEENLEGLGNQTKQIVEKYACTTRISPNTSQQNFVTQRSKRALKQFRLPLEETELEKRIIVDDTSTQWSKNMKHLTPSTLTQIDYNEKEKGAITQSPLSDCLTRSHSIPQANRSPLPIAKVSSFPSIRPIYLTRVLFQDNSSHLPAASYRKKDSGVQESSHFLQGAKKNNLSLAILTLEMTGDQREVGSLGTSATNSVTYKKVENTVLPKPDLPKTSGKVELLPKVHIYQKDLFPTETSNGSPGHLDLVEGSLLQGTEGAIKWNEANRPGKVPFLRVATESSAKTPSKLLDPLAWDNHYGTQIPKEEWKSQEKSPEKTAFKKKDTILSLNACESNHAIAAINEGQNKPEIEVTWAKQGRTERLCSQNPPVLKRHQREITRTTLQSDQEEIDYDDTISVEMKKEDFDIYDEDENQSPRSFQKKTRHYFIAAVERLWDYGMSSSPHVLRNRAQSGSVPQFKKVVFQEFTDGSFTQPLYRGELNEHLGLLGPYIRAEVEDNIMVTFRNQASRPYSFYSSLISYEEDQRQGAEPRKNFVKPNETKTYFWKVQHHMAPTKDEFDCKAWAYFSDVDLEKDVHSGLIGPLLVCHTNTLNPAHGRQVTVQEFALFFTIFDETKSWYFTENMERNCRAPCNIQMEDPTFKENYRFHAINGYIMDTLPGLVMAQDQRIRWYLLSMGSNENIHSIHFSGHVFTVRKKEEYKMALYNLYPGVFETVEMLPSKAGIWRVECLIGEHLHAGMSTLFLVYSNKCQTPLGMASGHIRDFQITASGQYGQWAPKLARLHYSGSINAWSTKEPFSWIKVDLLAPMIIHGIKTQGARQKFSSLYISQFIIMYSLDGKKWQTYRGNSTGTLMVFFGNVDSSGIKHNIFNPPIIARYIRLHPTHYSIRSTLRMELMGCDLNSCSMPLGMESKAISDAQITASSYFTNMFATWSPSKARLHLQGRSNAWRPQVNNPKEWLQVDFQKTMKVTGVTTQGVKSLLTSMYVKEFLISSSQDGHQWTLFFQNGKVKVFQGNQDSFTPVVNSLDPPLLTRYLRIHPQSWVHQIALRMEVLGCEAQDLYGGSPAGSPTSTEEGTSESATPESGPGTSTEPSEGSAPGSPAGSPTSTEEGTSTEPSEGSAPGTSTEPSEGSAPGTSESATPESGPGSEPATSGSETPGSEPATSGSETPGSPAGSPTSTEEGTSESATPESGPGTSTEPSEGSAPGTSTEPSEGSAPGSPAGSPTSTEEGTSTEPSEGSAPGTSTEPSEGSAPGTSESATPESGPGTSTEPSEGSAPGTSESATPESGPGSEPATSGSETPGTSTEPSEGSAPGTSTEPSEGSAPGTSESATPESGPGTSESATPESGPGSPAGSPTSTEEGTSESATPESGPGSEPATSGSETPGTSESATPESGPGTSTEPSEGSAPGTSTEPSEGSAPGTSTEPSEGSAPGTSTEPSEGSAPGTSTEPSEGSAPGTSTEPSEGSAPGSPAGSPTSTEEGTSTEPSEGSAPGTSESATPESGPGSEPATSGSETPGTSESATPESGPGSEPATSGSETPGTSESATPESGPGTSTEPSEGSAPGTSESATPESGPGSPAGSPTSTEEGSPAGSPTSTEEGSPAGSPTSTEEGTSESATPESGPGTSTEPSEGSAPGTSESATPESGPGSEPATSGSETPGTSESATPESGPGSEPATSGSETPGTSESATPESGPGTSTEPSEGSAPGSPAGSPTSTEEGTSESATPESGPGSEPATSGSETPGTSESATPESGPGSPAGSPTSTEEGSPAGSPTSTEEGTSTEPSEGSAPGTSESATPESGPGTSESATPESGPGTSESATPESGPGSEPATSGSETPGSEPATSGSETPGSPAGSPTSTEEGTSTEPSEGSAPGTSTEPSEGSAPGSEPATSGSETPGTSESATPESGPGTSTEPSEGSAP

SEQ ID NO: 864 - protein, 3208 aa, Artificial Sequence
  Description of Artificial Sequence: Synthetic polypeptide
  MOD_RES (2763)..(2765): Any amino acid
  MOD_RES (2776)..(2779): Any amino acid
ATRRYYLGAVELSWDYMQSDLGELPVDARFPPRVPKSFPFNTSVVYKKTLFVEFTDHLFNIAKPRPPWMGLLGPTIQAEVYDTVVITLKNMASHPVSLHAVGVSYWKASEGAEYDDQTSQREKEDDKVFPGGSHTYVWQVLKENGPMASDPLCLTYSYLSHVDLVKDLNSGLIGALLVCREGSLAKEKTQTLHKFILLFAVFDEGKSWHSETKNSLMQDRDAASARAWPKMHTVNGYVNRSLPGLIGCHRKSVYWHVIGMGTTPEVHSIFLEGHTFLVRNHRQASLEISPITFLTAQTLLMDLGQFLLFCHISSHQHDGMEAYVKVDSCPEEPQLRMKNNEEAEDYDDDLTDSEMDVVRFDDDNSPSFIQIRSVAKKHPKTWVHYIAAEEEDWDYAPLVLAPDDRSYKSQYLNNGPQRIGRKYKKVRFMAYTDETFKTREAIQHESGILGPLLYGEVGDTLLIIFKNQASRPYNIYPHGITDVRPLYSRRLPKGVKHLKDFPILPGEIFKYKWTVTVEDGPTKSDPRCLTRYYSSFVNMERDLASGLIGPLLICYKESVDQRGNQIMSDKRNVILFSVFDENRSWYLTENIQRFLPNPAGVQLEDPEFQASNIMHSINGYVFDSLQLSVCLHEVAYWYILSIGAQTDFLSVFFSGYTFKHKMVYEDTLTLFPFSGETVFMSMENPGLWILGCHNSDFRNRGMTALLKVSSCDKNTGDYYEDSYEDISAYLLSKNNAIEPRSFSQNSRHPSTRQKQFNATTIPENDIEKTDPWFAHRTPMPKIQNVSSSDLLMLLRQSPTPHGLSLSDLQEAKYETFSDDPSPGAIDSNNSLSEMTHFRPQLHHSGDMVFTPESGLQLRLNEKLGTTAATELKKLDFKVSSTSNNLISTIPSDNLAAGTDNTSSLGPPSMPVHYDSQLDTTLFGKKSSPLTESGGPLSLSEENNDSKLLESGLMNSQESSWGKNVSSTESGRLFKGKRAHGPALLTKDNALFKVSISLLKTNKTSNNSATNRKTHIDGPSLLIENSPSVWQNILESDTEFKKVTPLIHDRMLMDKNATALRLNHMSNKTTSSKNMEMVQQKKEGPIPPDAQNPDMSFFKMLFLPESARWIQRTHGKNSLNSGQGPSPKQLVSLGPEKSVEGQNFLSEKNKVVVGKGEFTKDVGLKEMVFPSSRNLFLTNLDNLHENNTHNQEKKIQEEIEKKETLIQENVVLPQIHTVTGTKNFMKNLFLLSTRQNVEGSYDGAYAPVLQDFRSLNDSTNRTKKHTAHFSKKGEEENLEGLGNQTKQIVEKYACTTRISPNTSQQNFVTQRSKRALKQFRLPLEETELEKRIIVDDTSTQWSKNMKHLTPSTLTQIDYNEKEKGAITQSPLSDCLTRSHSIPQANRSPLPIAKVSSFPSIRPIYLTRVLFQDNSSHLPAASYRKKDSGVQESSHFLQGAKKNNLSLAILTLEMTGDQREVGSLGTSATNSVTYKKVENTVLPKPDLPKTSGKVELLPKVHIYQKDLFPTETSNGSPGHLDLVEGSLLQGTEGAIKWNEANRPGKVPFLRVATESSAKTPSKLLDPLAWDNHYGTQIPKEEWKSQEKSPEKTAFKKKDTILSLNACESNHAIAAINEGQNKPEIEVTWAKQGRTERLCSQNPPVLKRHQREITRTTLQSDQEEIDYDDTISVEMKKEDFDIYDEDENQSPRSFQKKTRHYFIAAVERLWDYGMSSSPHVLRNRAQSGSVPQFKKVVFQEFTDGSFTQPLYRGELNEHLGLLGPYIRAEVEDNIMVTFRNQASRPYSFYSSLISYEEDQRQGAEPRKNFVKPNETKTYFWKVQHHMAPTKDEFDCKAWAYFSDVDLEKDVHSGLIGPLLVCHTNTLNPAHGRQVTVQEFALFFTIFDETKSWYFTENMERNCRAPCNIQMEDPTFKENYRFHAINGYIMDTLPGLVMAQDQRIRWYLLSMGSNENIHSIHFSGHVFTVRKKEEYKMALYNLYPGVFETVEMLPSKAGIWRVECLIGEHLHAGMSTLFLVYSNKCQTPLGMASGHIRDFQITASGQYGQWAPKLARLHYSGSINAWSTKEPFSWIKVDLLAPMIIHGIKTQGARQKFSSLYISQFIIMYSLDGKKWQTYRGNSTGTLMVFFGNVDSSGIKHNIFNPPIIARYIRLHPTHYSIRSTLRMELMGCDLNSCSMPLGMESKAISDAQITASSYFTNMFATWSPSKARLHLQGRSNAWRPQVNNPKEWLQVDFQKTMKVTGVTTQGVKSLLTSMYVKEFLISSSQDGHQWTLFFQNGKVKVFQGNQDSFTPVVNSLDPPLLTRYLRIHPQSWVHQIALRMEVLGCEAQDLYGGSTSESPSGTAPGTSPSGESSTAPGSTSESPSGTAPGSTSESPSGTAPGTSTPESGSASPGTSTPESGSASPGSTSESPSGTAPGSTSESPSGTAPGTSPSGESSTAPGSTSESPSGTAPGTSPSGESSTAPGTSPSGESSTAPGSTSSTAESPGPGTSPSGESSTAPGTSPSGESSTAPGSTSSTAESPGPGTSTPESGSASPGTSTPESGSASPGSTSESPSGTAPGSTSESPSGTAPGTSTPESGSASPGSTSSTAESPGPGTSTPESGSASPGSTSESPSGTAPGTSPSGESSTAPGSTSSTAESPGPGTSPSGESSTAPGTSTPESGSASPGSTSSTAESPGPGSTSSTAESPGPGSTSSTAESPGPGSTSSTAESPGPGTSPSGESSTAPGSTSESPSGTAPGSTSESPSGTAPGTSTPESGPXXXGASASGAPSTXXXXSESPSGTAPGSTSESPSGTAPGSTSESPSGTAPGSTSESPSGTAPGSTSESPSGTAPGSTSESPSGTAPGTSTPESGSASPGTSPSGESSTAPGTSPSGESSTAPGSTSSTAESPGPGTSPSGESSTAPGTSTPESGSASPGSTSESPSGTAPGSTSESPSGTAPGTSPSGESSTAPGSTSESPSGTAPGTSTPESGSASPGTSTPESGSASPGSTSESPSGTAPGTSTPESGSASPGSTSSTAESPGPGSTSESPSGTAPGSTSESPSGTAPGTSPSGESSTAPGSTSSTAESPGPGTSPSGESSTAPGTSTPESGSASPGTSPSGESSTAPGTSPSGESSTAPGTSPSGESSTAPGSTSSTAESPGPGSTSSTAESPGPGTSPSGESSTAPGSSPSASTGTGPGSSTPSGATGSPGSSTPSGATGSP

SEQ ID NO: 865 - protein, 3197 aa, Artificial Sequence
  Description of Artificial Sequence: Synthetic polypeptide
ATRRYYLGAVELSWDYMQSDLGELPVDARFPPRVPKSFPFNTSVVYKKTLFVEFTDHLFNIAKPRPPWMGLLGPTIQAEVYDTVVITLKNMASHPVSLHAVGVSYWKASEGAEYDDQTSQREKEDDKVFPGGSHTYVWQVLKENGPMASDPLCLTYSYLSHVDLVKDLNSGLIGALLVCREGSLAKEKTQTLHKFILLFAVFDEGKSWHSETKNSLMQDRDAASARAWPKMHTVNGYVNRSLPGLIGCHRKSVYWHVIGMGTTPEVHSIFLEGHTFLVRNHRQASLEISPITFLTAQTLLMDLGQFLLFCHISSHQHDGMEAYVKVDSCPEEPQLRMKNNEEAEDYDDDLTDSEMDVVRFDDDNSPSFIQIRSVAKKHPKTWVHYIAAEEEDWDYAPLVLAPDDRSYKSQYLNNGPQRIGRKYKKVRFMAYTDETFKTREAIQHESGILGPLLYGEVGDTLLIIFKNQASRPYNIYPHGITDVRPLYSRRLPKGVKHLKDFPILPGEIFKYKWTVTVEDGPTKSDPRCLTRYYSSFVNMERDLASGLIGPLLICYKESVDQRGNQIMSDKRNVILFSVFDENRSWYLTENIQRFLPNPAGVQLEDPEFQASNIMHSINGYVFDSLQLSVCLHEVAYWYILSIGAQTDFLSVFFSGYTFKHKMVYEDTLTLFPFSGETVFMSMENPGLWILGCHNSDFRNRGMTALLKVSSCDKNTGDYYEDSYEDISAYLLSKNNAIEPRSFSQNSRHPSTRQKQFNATTIPENDIEKTDPWFAHRTPMPKIQNVSSSDLLMLLRQSPTPHGLSLSDLQEAKYETFSDDPSPGAIDSNNSLSEMTHFRPQLHHSGDMVFTPESGLQLRLNEKLGTTAATELKKLDFKVSSTSNNLISTIPSDNLAAGTDNTSSLGPPSMPVHYDSQLDTTLFGKKSSPLTESGGPLSLSEENNDSKLLESGLMNSQESSWGKNVSSTESGRLFKGKRAHGPALLTKDNALFKVSISLLKTNKTSNNSATNRKTHIDGPSLLIENSPSVWQNILESDTEFKKVTPLIHDRMLMDKNATALRLNHMSNKTTSSKNMEMVQQKKEGPIPPDAQNPDMSFFKMLFLPESARWIQRTHGKNSLNSGQGPSPKQLVSLGPEKSVEGQNFLSEKNKVVVGKGEFTKDVGLKEMVFPSSRNLFLTNLDNLHENNTHNQEKKIQEEIEKKETLIQENVVLPQIHTVTGTKNFMKNLFLLSTRQNVEGSYDGAYAPVLQDFRSLNDSTNRTKKHTAHFSKKGEEENLEGLGNQTKQIVEKYACTTRISPNTSQQNFVTQRSKRALKQFRLPLEETELEKRIIVDDTSTQWSKNMKHLTPSTLTQIDYNEKEKGAITQSPLSDCLTRSHSIPQANRSPLPIAKVSSFPSIRPIYLTRVLFQDNSSHLPAASYRKKDSGVQESSHFLQGAKKNNLSLAILTLEMTGDQREVGSLGTSATNSVTYKKVENTVLPKPDLPKTSGKVELLPKVHIYQKDLFPTETSNGSPGHLDLVEGSLLQGTEGAIKWNEANRPGKVPFLRVATESSAKTPSKLLDPLAWDNHYGTQIPKEEWKSQEKSPEKTAFKKKDTILSLNACESNHAIAAINEGQNKPEIEVTWAKQGRTERLCSQNPPVLKRHQREITRTTLQSDQEEIDYDDTISVEMKKEDFDIYDEDENQSPRSFQKKTRHYFIAAVERLWDYGMSSSPHVLRNRAQSGSVPQFKKVVFQEFTDGSFTQPLYRGELNEHLGLLGPYIRAEVEDNIMVTFRNQASRPYSFYSSLISYEEDQRQGAEPRKNFVKPNETKTYFWKVQHHMAPTKDEFDCKAWAYFSDVDLEKDVHSGLIGPLLVCHTNTLNPAHGRQVTVQEFALFFTIFDETKSWYFTENMERNCRAPCNIQMEDPTFKENYRFHAINGYIMDTLPGLVMAQDQRIRWYLLSMGSNENIHSIHFSGHVFTVRKKEEYKMALYNLYPGVFETVEMLPSKAGIWRVECLIGEHLHAGMSTLFLVYSNKCQTPLGMASGHIRDFQITASGQYGQWAPKLARLHYSGSINAWSTKEPFSWIKVDLLAPMIIHGIKTQGARQKFSSLYISQFIIMYSLDGKKWQTYRGNSTGTLMVFFGNVDSSGIKHNIFNPPIIARYIRLHPTHYSIRSTLRMELMGCDLNSCSMPLGMESKAISDAQITASSYFTNMFATWSPSKARLHLQGRSNAWRPQVNNPKEWLQVDFQKTMKVTGVTTQGVKSLLTSMYVKEFLISSSQDGHQWTLFFQNGKVKVFQGNQDSFTPVVNSLDPPLLTRYLRIHPQSWVHQIALRMEVLGCEAQDLYGGASPGTSSTGSPGSSPSASTGTGPGSSPSASTGTGPGTPGSGTASSSPGSSTPSGATGSPGSNPSASTGTGPGASPGTSSTGSPGTPGSGTASSSPGSSTPSGATGSPGTPGSGTASSSPGASPGTSSTGSPGASPGTSSTGSPGTPGSGTASSSPGSSTPSGATGSPGASPGTSSTGSPGTPGSGTASSSPGSSTPSGATGSPGSNPSASTGTGPGSSPSASTGTGPGSSTPSGATGSPGSSTPSGATGSPGASPGTSSTGSPGASPGTSSTGSPGASPGTSSTGSPGTPGSGTASSSPGASPGTSSTGSPGASPGTSSTGSPGASPGTSSTGSPGSSPSASTGTGPGTPGSGTASSSPGASPGTSSTGSPGASPGTSSTGSPGASPGTSSTGSPGSSTPSGATGSPGSSTPSGATGSPGASPGTSSTGSPGTPGSGTASSSPGSSTPSGATGSPGSSTPSGATGSPGSSTPSGATGSPGSSPSASTGTGPGASPGTSSTGSPGASPGTSSTGSPGTPGSGTASSSPGASPGTSSTGSPGASPGTSSTGSPGASPGTSSTGSPGASPGTSSTGSPGTPGSGTASSSPGSSTPSGATGSPGTPGSGTASSSPGSSTPSGATGSPGTPGSGTASSSPGSSTPSGATGSPGSSTPSGATGSPGSSPSASTGTGPGSSPSASTGTGPGASPGTSSTGSPGTPGSGTASSSPGSSTPSGATGSPGSSPSASTGTGPGSSPSASTGTGPGASPGTSSTGSPGASPGTSSTGSPGSSTPSGATGSPGSSPSASTGTGPGASPGTSSTGSPGSSPSASTGTGPGTPGSGTASSSPGSSTPSGATGSPGSSTPSGATGSPGASPGTSSTGSP

SEQ ID NO: 866 - protein, 2303 aa, Artificial Sequence
  Description of Artificial Sequence: Synthetic polypeptide
ATRRYYLGAVELSWDYMQSDLGELPVDARFPPRVPKSFPFNTSVVYKKTLFVEFTVHLFNIAKPRPPWMGLLGPTIQAEVYDTVVITLKNMASHPVSLHAVGVSYWKASEGAEYDDQTSQREKEDDKVFPGGSHTYVWQVLKENGPMASDPLCLTYSYLSHVDLVKDLNSGLIGALLVCREGSLAKEKTQTLHKFILLFAVFDEGKSWHSETKNSLMQDRDAASARAWPKMHTVNGYVNRSLPGLIGCHRKSVYWHVIGMGTTPEVHSIFLEGHTFLVRNHRQASLEISPITFLTAQTLLMDLGQFLLFCHISSHQHDGMEAYVKVDSCPEEPQLRMKNNEEAEDYDDDLTDSEMDVVRFDDDNSPSFIQIRSVAKKHPKTWVHYIAAEEEDWDYAPLVLAPDDRSYKSQYLNNGPQRIGRKYKKVRFMAYTDETFKTREAIQHESGILGPLLYGEVGDTLLIIFKNQASRPYNIYPHGITDVRPLYSRRLPKGVKHLKDFPILPGEIFKYKWTVTVEDGPTKSDPRCLTRYYSSFVNMERDLASGLIGPLLICYKESVDQRGNQIMSDKRNVILFSVFDENRSWYLTENIQRFLPNPAGVQLEDPEFQASNIMHSINGYVFDSLQLSVCLHEVAYWYILSIGAQTDFLSVFFSGYTFKHKMVYEDTLTLFPFSGETVFMSMENPGLWILGCHNSDFRNRGMTALLKVSSCDKNTGDYYEDSYEDISAYLLSKNNAIEPRSFSQNPPVLKRHQREITRTTLQSDQEEIDYDDTISVEMKKEDFDIYDEDENQSPRSFQKKTRHYFIAAVERLWDYGMSSSPHVLRNRAQSGSVPQFKKVVFQEFTDGSFTQPLYRGELNEHLGLLGPYIRAEVEDNIMVTFRNQASRPYSFYSSLISYEEDQRQGAEPRKNFVKPNETKTYFWKVQHHMAPTKDEFDCKAWAYFSDVDLEKDVHSGLIGPLLVCHTNTLNPAHGRQVTVQEFALFFTIFDETKSWYFTENMERNCRAPCNIQMEDPTFKENYRFHAINGYIMDTLPGLVMAQDQRIRWYLLSMGSNENIHSIHFSGHVFTVRKKEEYKMALYNLYPGVFETVEMLPSKAGIWRVECLIGEHLHAGMSTLFLVYSNKCQTPLGMASGHIRDFQITASGQYGQWAPKLARLHYSGSINAWSTKEPFSWIKVDLLAPMIIHGIKTQGARQKFSSLYISQFIIMYSLDGKKWQTYRGNSTGTLMVFFGNVDSSGIKHNIFNPPIIARYIRLHPTHYSIRSTLRMELMGCDLNSCSMPLGMESKAISDAQITASSYFTNMFATWSPSKARLHLQGRSNAWRPQVNNPKEWLQVDFQKTMKVTGVTTQGVKSLLTSMYVKEFLISSSQDGHQWTLFFQNGKVKVFQGNQDSFTPVVNSLDPPLLTRYLRIHPQSWVHQIALRMEVLGCEAQDLYGGSPAGSPTSTEEGTSESATPESGPGTSTEPSEGSAPGSPAGSPTSTEEGTSTEPSEGSAPGTSTEPSEGSAPGTSESATPESGPGSEPATSGSETPGSEPATSGSETPGSPAGSPTSTEEGTSESATPESGPGTSTEPSEGSAPGTSTEPSEGSAPGSPAGSPTSTEEGTSTEPSEGSAPGTSTEPSEGSAPGTSESATPESGPGTSTEPSEGSAPGTSESATPESGPGSEPATSGSETPGTSTEPSEGSAPGTSTEPSEGSAPGTSESATPESGPGTSESATPESGPGSPAGSPTSTEEGTSESATPESGPGSEPATSGSETPGTSESATPESGPGTSTEPSEGSAPGTSTEPSEGSAPGTSTEPSEGSAPGTSTEPSEGSAPGTSTEPSEGSAPGTSTEPSEGSAPGSPAGSPTSTEEGTSTEPSEGSAPGTSESATPESGPGSEPATSGSETPGTSESATPESGPGSEPATSGSETPGTSESATPESGPGTSTEPSEGSAPGTSESATPESGPGSPAGSPTSTEEGSPAGSPTSTEEGSPAGSPTSTEEGTSESATPESGPGTSTEPSEGSAPGTSESATPESGPGSEPATSGSETPGTSESATPESGPGSEPATSGSETPGTSESATPESGPGTSTEPSEGSAPGSPAGSPTSTEEGTSESATPESGPGSEPATSGSETPGTSESATPESGPGSPAGSPTSTEEGSPAGSPTSTEEGTSTEPSEGSAPGTSESATPESGPGTSESATPESGPGTSESATPESGPGSEPATSGSETPGSEPATSGSETPGSPAGSPTSTEEGTSTEPSEGSAPGTSTEPSEGSAPGSEPATSGSETPGTSESATPESGPGTSTEPSEGSAP

SEQ ID NO: 867 - protein, 2303 aa, Artificial Sequence
  Description of Artificial Sequence: Synthetic polypeptide
ATRRYYLGAVELSWDYMQSDLGELPVDARFPPRVPKSFPFNTSVVYKKTLFVEFTVHLFNIAKPRPPWMGLLGPTIQAEVYDTVVITLKNMASHPVSLHAVGVSYWKASEGAEYDDQTSQREKEDDKVFPGGSHTYVWQVLKENGPMASDPLCLTYSYLSHVDLVKDLNSGLIGALLVCREGSLAKEKTQTLHKFILLFAVFDEGKSWHSETKNSLMQDRDAASARAWPKMHTVNGYVNRSLPGLIGCHRKSVYWHVIGMGTTPEVHSIFLEGHTFLVRNHRQASLEISPITFLTAQTLLMDLGQFLLFCHISSHQHDGMEAYVKVDSCPEEPQLRMKNNEEAEDYDDDLTDSEMDVVRFDDDNSPSFIQIRSVAKKHPKTWVHYIAAEEEDWDYAPLVLAPDDRSYKSQYLNNGPQRIGRKYKKVRFMAYTDETFKTREAIQHESGILGPLLYGEVGDTLLIIFKNQASRPYNIYPHGITDVRPLYSRRLPKGVKHLKDFPILPGEIFKYKWTVTVEDGPTKSDPRCLTRYYSSFVNMERDLASGLIGPLLICYKESVDQRGNQIMSDKRNVILFSVFDENRSWYLTENIQRFLPNPAGVQLEDPEFQASNIMHSINGYVFDSLQLSVCLHEVAYWYILSIGAQTDFLSVFFSGYTFKHKMVYEDTLTLFPFSGETVFMSMENPGLWILGCHNSDFRNRGMTALLKVSSCDKNTGDYYEDSYEDISAYLLSKNNAIEPRSFSQNPPVLKRHQREITRTTLQSDQEEIDYDDTISVEMKKEDFDIYDEDENQSPRSFQKKTRHYFIAAVERLWDYGMSSSPHVLRNRAQSGSVPQFKKVVFQEFTDGSFTQPLYRGELNEHLGLLGPYIRAEVEDNIMVTFRNQASRPYSFYSSLISYEEDQRQGAEPRKNFVKPNETKTYFWKVQHHMAPTKDEFDCKAWAYFSDVDLEKDVHSGLIGPLLVCHTNTLNPAHGRQVTVQEFALFFTIFDETKSWYFTENMERNCRAPCNIQMEDPTFKENYRFHAINGYIMDTLPGLVMAQDQRIRWYLLSMGSNENIHSIHFSGHVFTVRKKEEYKMALYNLYPGVFETVEMLPSKAGIWRVECLIGEHLHAGMSTLFLVYSNKCQTPLGMASGHIRDFQITASGQYGQWAPKLARLHYSGSINAWSTKEPFSWIKVDLLAPMIIHGIKTQGARQKFSSLYISQFIIMYSLDGKKWQTYRGNSTGTLMVFFGNVDSSGIKHNIFNPPIIARYIRLHPTHYSIRSTLRMELMGCDLNSCSMPLGMESKAISDAQITASSYFTNMFATWSPSKARLHLQGRSNAWRPQVNNPKEWLQVDFQKTMKVTGVTTQGVKSLLTSMYVKEFLISSSQDGHQWTLFFQNGKVKVFQGNQDSFTPVVNSLDPPLLTRYLRIHPQSWVHQIALRMEVLGCEAQDLYGGASPGTSSTGSPGSSPSASTGTGPGSSPSASTGTGPGTPGSGTASSSPGSSTPSGATGSPGSNPSASTGTGPGASPGTSSTGSPGTPGSGTASSSPGSSTPSGATGSPGTPGSGTASSSPGASPGTSSTGSPGASPGTSSTGSPGTPGSGTASSSPGSSTPSGATGSPGASPGTSSTGSPGTPGSGTASSSPGSSTPSGATGSPGSNPSASTGTGPGSSPSASTGTGPGSSTPSGATGSPGSSTPSGATGSPGASPGTSSTGSPGASPGTSSTGSPGASPGTSSTGSPGTPGSGTASSSPGASPGTSSTGSPGASPGTSSTGSPGASPGTSSTGSPGSSPSASTGTGPGTPGSGTASSSPGASPGTSSTGSPGASPGTSSTGSPGASPGTSSTGSPGSSTPSGATGSPGSSTPSGATGSPGASPGTSSTGSPGTPGSGTASSSPGSSTPSGATGSPGSSTPSGATGSPGSSTPSGATGSPGSSPSASTGTGPGASPGTSSTGSPGASPGTSSTGSPGTPGSGTASSSPGASPGTSSTGSPGASPGTSSTGSPGASPGTSSTGSPGASPGTSSTGSPGTPGSGTASSSPGSSTPSGATGSPGTPGSGTASSSPGSSTPSGATGSPGTPGSGTASSSPGSSTPSGATGSPGSSTPSGATGSPGSSPSASTGTGPGSSPSASTGTGPGASPGTSSTGSPGTPGSGTASSSPGSSTPSGATGSPGSSPSASTGTGPGSSPSASTGTGPGASPGTSSTGSPGASPGTSSTGSPGSSTPSGATGSPGSSPSASTGTGPGASPGTSSTGSPGSSPSASTGTGPGTPGSGTASSSPGSSTPSGATGSPGSSTPSGATGSPGASPGTSSTGSP

SEQ ID NO: 868 - protein, 3208 aa, Artificial Sequence
  Description of Artificial Sequence: Synthetic polypeptide
ATRRYYLGAVELSWDYMQSDLGELPVDARFPPRVPKSFPFNTSVVYKKTLFVEFTDHLFNIAKPRPPWMGLLGPTIQAEVYDTVVITLKNMASHPVSLHAVGVSYWKASEGAEYDDQTSQREKEDDKVFPGGSHTYVWQVLKENGPMASDPLCLTYSYLSHVDLVKDLNSGLIGALLVCREGSLAKEKTQTLHKFILLFAVFDEGKSWHSETKNSLMQDRDAASARAWPKMHTVNGYVNRSLPGLIGCHRKSVYWHVIGMGTTPEVHSIFLEGHTFLVRNHRQASLEISPITFLTAQTLLMDLGQFLLFCHISSHQHDGMEAYVKVDSCPEEPQLRMKNNEEAEDYDDDLTDSEMDVVRFDDDNSPSFIQIRSVAKKHPKTWVHYIAAEEEDWDYAPLVLAPDDRSYKSQYLNNGPQRIGRKYKKVRFMAYTDETFKTREAIQHESGILGPLLYGEVGDTLLIIFKNQASRPYNIYPHGITDVRPLYSRRLPKGVKHLKDFPILPGEIFKYKWTVTVEDGPTKSDPRCLTRYYSSFVNMERDLASGLIGPLLICYKESVDQRGNQIMSDKRNVILFSVFDENRSWYLTENIQRFLPNPAGVQLEDPEFQASNIMHSINGYVFDSLQLSVCLHEVAYWYILSIGAQTDFLSVFFSGYTFKHKMVYEDTLTLFPFSGETVFMSMENPGLWILGCHNSDFRNRGMTALLKVSSCDKNTGDYYEDSYEDISAYLLSKNNAIEPRSFSQNSRHPSTRQKQFNATTIPENDIEKTDPWFAHRTPMPKIQNVSSSDLLMLLRQSPTPHGLSLSDLQEAKYETFSDDPSPGAIDSNNSLSEMTHFRPQLHHSGDMVFTPESGLQLRLNEKLGTTAATELKKLDFKVSSTSNNLISTIPSDNLAAGTDNTSSLGPPSMPVHYDSQLDTTLFGKKSSPLTESGGPLSLSEENNDSKLLESGLMNSQESSWGKNVSSTESGRLFKGKRAHGPALLTKDNALFKVSISLLKTNKTSNNSATNRKTHIDGPSLLIENSPSVWQNILESDTEFKKVTPLIHDRMLMDKNATALRLNHMSNKTTSSKNMEMVQQKKEGPIPPDAQNPDMSFFKMLFLPESARWIQRTHGKNSLNSGQGPSPKQLVSLGPEKSVEGQNFLSEKNKVVVGKGEFTKDVGLKEMVFPSSRNLFLTNLDNLHENNTHNQEKKIQEEIEKKETLIQENVVLPQIHTVTGTKNFMKNLFLLSTRQNVEGSYDGAYAPVLQDFRSLNDSTNRTKKHTAHFSKKGEEENLEGLGNQTKQIVEKYACTTRISPNTSQQNFVTQRSKRALKQFRLPLEETELEKRIIVDDTSTQWSKNMKHLTPSTLTQIDYNEKEKGAITQSPLSDCLTRSHSIPQANRSPLPIAKVSSFPSIRPIYLTRVLFQDNSSHLPAASYRKKDSGVQESSHFLQGAKKNNLSLAILTLEMTGDQREVGSLGTSATNSVTYKKVENTVLPKPDLPKTSGKVELLPKVHIYQKDLFPTETSNGSPGHLDLVEGSLLQGTEGAIKWNEANRPGKVPFLRVATESSAKTPSKLLDPLAWDNHYGTQIPKEEWKSQEKSPEKTAFKKKDTILSLNACESNHAIAAINEGQNKPEIEVTWAKQGRTERLCSQNPPVLKRHQREITRTTLQSDQEEIDYDDTISVEMKKEDFDIYDEDENQSPRSFQKKTRHYFIAAVERLWDYGMSSSPHVLRNRAQSGSVPQFKKVVFQEFTDGSFTQPLYRGELNEHLGLLGPYIRAEVEDNIMVTFRNQASRPYSFYSSLISYEEDQRQGAEPRKNFVKPNETKTYFWKVQHHMAPTKDEFDCKAWAYFSDVDLEKDVHSGLIGPLLVCHTNTLNPAHGRQVTVQEFALFFTIFDETKSWYFTENMERNCRAPCNIQMEDPTFKENYRFHAINGYIMDTLPGLVMAQDQRIRWYLLSMGSNENIHSIHFSGHVFTVRKKEEYKMALYNLYPGVFETVEMLPSKAGIWRVECLIGEHLHAGMSTLFLVYSNKCQTPLGMASGHIRDFQITASGQYGQWAPKLARLHYSGSINAWSTKEPFSWIKVDLLAPMIIHGIKTQGARQKFSSLYISQFIIMYSLDGKKWQTYRGNSTGTLMVFFGNVDSSGIKHNIFNPPIIARYIRLHPTHYSIRSTLRMELMGCDLNSCSMPLGMESKAISDAQITASSYFTNMFATWSPSKARLHLQGRSNAWRPQVNNPKEWLQVDFQKTMKVTGVTTQGVKSLLTSMYVKEFLISSSQDGHQWTLFFQNGKVKVFQGNQDSFTPVVNSLDPPLLTRYLRIHPQSWVHQIALRMEVLGCEAQDLYGGTSTEPSEGSAPGSEPATSGSETPGSPAGSPTSTEEGSTSSTAESPGPGTSTPESGSASPGSTSESPSGTAPGSTSESPSGTAPGTSTPESGSASPGTSTPESGSASPGSEPATSGSETPGTSESATPESGPGSPAGSPTSTEEGTSTEPSEGSAPGTSESATPESGPGTSTEPSEGSAPGTSTEPSEGSAPGSPAGSPTSTEEGTSTEPSEGSAPGTSTEPSEGSAPGTSESATPESGPGTSESATPESGPGTSTEPSEGSAPGTSTEPSEGSAPGTSESATPESGPGTSTEPSEGSAPGSEPATSGSETPGSPAGSPTSTEEGSSTPSGATGSPGTPGSGTASSSPGSSTPSGATGSPGTSTEPSEGSAPGTSTEPSEGSAPGSEPATSGSETPGSPAGSPTSTEEGSPAGSPTSTEEGTSTEPSEGSAPGASASGAPSTGGTSESATPESGPGSPAGSPTSTEEGSPAGSPTSTEEGSTSSTAESPGPGSTSESPSGTAPGTSPSGESSTAPGTPGSGTASSSPGSSTPSGATGSPGSSPSASTGTGPGSEPATSGSETPGTSESATPESGPGSEPATSGSETPGSTSSTAESPGPGSTSSTAESPGPGTSPSGESSTAPGSEPATSGSETPGSEPATSGSETPGTSTEPSEGSAPGSTSSTAESPGPGTSTPESGSASPGSTSESPSGTAPGTSTEPSEGSAPGTSTEPSEGSAPGTSTEPSEGSAPGSSTPSGATGSPGSSPSASTGTGPGASPGTSSTGSPGSEPATSGSETPGTSESATPESGPGSPAGSPTSTEEGSSTPSGATGSPGSSPSASTGTGPGASPGTSSTGSPGTSESATPESGPGTSTEPSEGSAPGTSTEPSEGSAP

SEQ ID NO: 869 - protein, 3651 aa, Artificial Sequence
  Description of Artificial Sequence: Synthetic polypeptide
ATRRYYLGAVELSWDYMQSDLGELPVDARFPPRVPKSFPFNTSVVYKKTLFVEFTDHLFNIAKPRPPWMGLLGPTIQAEVYDTVVITLKNMASHPVSLHAVGVSYWKASEGAEYDDQTSQREKEDDKVFPGGSHTYVWQVLKENGPMASDPLCLTYSYLSHVDLVKDLNSGLIGALLVCREGSLAKEKTQTLHKFILLFAVFDEGKSWHSETKNSLMQDRDAASARAWPKMHTVNGYVNRSLPGLIGCHRKSVYWHVIGMGTTPEVHSIFLEGHTFLVRNHRQASLEISPITFLTAQTLLMDLGQFLLFCHISSHQHDGMEAYVKVDSCPEEPQLRMKNNEEAEDYDDDLTDSEMDVVRFDDDNSPSFIQIRSVAKKHPKTWVHYIAAEEEDWDYAPLVLAPDDRSYKSQYLNNGPQRIGRKYKKVRFMAYTDETFKTREAIQHESGILGPLLYGEVGDTLLIIFKNQASRPYNIYPHGITDVRPLYSRRLPKGVKHLKDFPILPGEIFKYKWTVTVEDGPTKSDPRCLTRYYSSFVNMERDLASGLIGPLLICYKESVDQRGNQIMSDKRNVILFSVFDENRSWYLTENIQRFLPNPAGVQLEDPEFQASNIMHSINGYVFDSLQLSVCLHEVAYWYILSIGAQTDFLSVFFSGYTFKHKMVYEDTLTLFPFSGETVFMSMENPGLWILGCHNSDFRNRGMTALLKVSSCDKNTGDYYEDSYEDISAYLLSKNNAIEPRSFSQNSRHPSTRQKQFNATTIPENDIEKTDPWFAHRTPMPKIQNVSSSDLLMLLRQSPTPHGLSLSDLQEAKYETFSDDPSPGAIDSNNSLSEMTHFRPQLHHSGDMVFTPESGLQLRLNEKLGTTAATELKKLDFKVSSTSNNLISTIPSDNLAAGTDNTSSLGPPSMPVHYDSQLDTTLFGKKSSPLTESGGPLSLSEENNDSKLLESGLMNSQESSWGKNVSSTESGRLFKGKRAHGPALLTKDNALFKVSISLLKTNKTSNNSATNRKTHIDGPSLLIENSPSVWQNILESDTEFKKVTPLIHDRMLMDKNATALRLNHMSNKTTSSKNMEMVQQKKEGPIPPDAQNPDMSFFKMLFLPESARWIQRTHGKNSLNSGQGPSPKQLVSLGPEKSVEGQNFLSEKNKVVVGKGEFTKDVGLKEMVFPSSRNLFLTNLDNLHENNTHNQEKKIQEEIEKKETLIQENVVLPQIHTVTGTKNFMKNLFLLSTRQNVEGSYDGAYAPVLQDFRSLNDSTNRTKKHTAHFSKKGEEENLEGLGNQTKQIVEKYACTTRISPNTSQQNFVTQRSKRALKQFRLPLEETELEKRIIVDDTSTQWSKNMKHLTPSTLTQIDYNEKEKGAITQSPLSDCLTRSHSIPQANRSPLPIAKVSSFPSIRPIYLTRVLFQDNSSHLPAASYRKKDSGVQESSHFLQGAKKNNLSLAILTLEMTGDQREVGSLGTSATNSVTYKKVENTVLPKPDLPKTSGKVELLPKVHIYQKDLFPTETSNGSPGHLDLVEGSLLQGTEGAIKWNEANRPGKVPFLRVATESSAKTPSKLLDPLAWDNHYGTQIPKEEWKSQEKSPEKTAFKKKDTILSLNACESNHAIAAINEGQNKPEIEVTWAKQGRTERLCSQNPPVLKRHQREITRTTLQSDQEEIDYDDTISVEMKKEDFDIYDEDENQSPRSFQKKTRHYFIAAVERLWDYGMSSSPHVLRNRAQSGSVPQFKKVVFQEFTDGSFTQPLYRGELNEHLGLLGPYIRAEVEDNIMVTFRNQASRPYSFYSSLISYEEDQRQGAEPRKNFVKPNETKTYFWKVQHHMAPTKDEFDCKAWAYFSDVDLEKDVHSGLIGPLLVCHTNTLNPAHGRQVTVQEFALFFTIFDETKSWYFTENMERNCRAPCNIQMEDPTFKENYRFHAINGYIMDTLPGLVMAQDQRIRWYLLSMGSNENIHSIHFSGHVFTVRKKEEYKMALYNLYPGVFETVEMLPSKAGIWRVECLIGEHLHAGMSTLFLVYSNKCQTPLGMASGHIRDFQITASGQYGQWAPKLARLHYSGSINAWSTKEPFSWIKVDLLAPMIIHGIKTQGARQKFSSLYISQFIIMYSLDGKKWQTYRGNSTGTLMVFFGNVDSSGIKHNIFNPPIIARYIRLHPTHYSIRSTLRMELMGCDLNSCSMPLGMESKAISDAQITASSYFTNMFATWSPSKARLHLQGRSNAWRPQVNNPKEWLQVDFQKTMKVTGVTTQGVKSLLTSMYVKEFLISSSQDGHQWTLFFQNGKVKVFQGNQDSFTPVVNSLDPPLLTRYLRIHPQSWVHQIALRMEVLGCEAQDLYGGTSTEPSEGSAPGSEPATSGSETPGSPAGSPTSTEEGSTSSTAESPGPGTSTPESGSASPGSTSESPSGTAPGSTSESPSGTAPGTSTPESGSASPGTSTPESGSASPGSEPATSGSETPGTSESATPESGPGSPAGSPTSTEEGTSTEPSEGSAPGTSESATPESGPGTSTEPSEGSAPGTSTEPSEGSAPGSPAGSPTSTEEGTSTEPSEGSAPGTSTEPSEGSAPGTSESATPESGPGTSESATPESGPGTSTEPSEGSAPGTSTEPSEGSAPGTSESATPESGPGTSTEPSEGSAPGSEPATSGSETPGSPAGSPTSTEEGSSTPSGATGSPGTPGSGTASSSPGSSTPSGATGSPGTSTEPSEGSAPGTSTEPSEGSAPGSEPATSGSETPGSPAGSPTSTEEGSPAGSPTSTEEGTSTEPSEGSAPGPEPTGPAPSGGSEPATSGSETPGTSESATPESGPGSPAGSPTSTEEGTSESATPESGPGSPAGSPTSTEEGSPAGSPTSTEEGTSESATPESGPGSPAGSPTSTEEGSPAGSPTSTEEGSTSSTAESPGPGSTSESPSGTAPGTSPSGESSTAPGSTSESPSGTAPGSTSESPSGTAPGTSPSGESSTAPGTSTEPSEGSAPGTSESATPESGPGTSESATPESGPGSEPATSGSETPGTSESATPESGPGTSESATPESGPGTSTEPSEGSAPGTSESATPESGPGTSTEPSEGSAPGTSPSGESSTAPGTSPSGESSTAPGTSPSGESSTAPGTSTEPSEGSAPGSPAGSPTSTEEGTSTEPSEGSAPGSSPSASTGTGPGSSTPSGATGSPGSSTPSGATGSPGSSTPSGATGSPGSSTPSGATGSPGASPGTSSTGSPGASASGAPSTGGTSPSGESSTAPGSTSSTAESPGPGTSPSGESSTAPGTSESATPESGPGTSTEPSEGSAPGTSTEPSEGSAPGSSPSASTGTGPGSSTPSGATGSPGASPGTSSTGSPGTSTPESGSASPGTSPSGESSTAPGTSPSGESSTAPGTSESATPESGPGSEPATSGSETPGTSTEPSEGSAPGSTSESPSGTAPGSTSESPSGTAPGTSTPESGSASPGSPAGSPTSTEEGTSESATPESGPGTSTEPSEGSAPGSPAGSPTSTEEGTSESATPESGPGSEPATSGSETPGSSTPSGATGSPGASPGTSSTGSPGSSTPSGATGSPGSTSESPSGTAPGTSPSGESSTAPGSTSSTAESPGPGSSTPSGATGSPGASPGTSSTGSPGTPGSGTASSSPGSPAGSPTSTEEGSPAGSPTSTEEGTSTEPSEGSAP

SEQ ID NO: 870 - protein, 2477 aa, Artificial Sequence
  Description of Artificial Sequence: Synthetic polypeptide
GSEPATSGSETPGTSESATPESGPGSEPATSGSETPGSPAGSPTSTEEGTSTEPSEGSAPGSEPATSGSETPGSEPATSGSETPGSEPATSGSETPGTSTEPSEGSAPGTSESATPESGPGSEPATSGSETPGTSTEPSEGSAPGATRRYYLGAVELSWDYMQSDLGELPVDARFPPRVPKSFPFNTSVVYKKTLFVEFTDHLFNIAKPRPPWMGLLGPTIQAEVYDTVVITLKNMASHPVSLHAVGVSYWKASEGAEYDDQTSQREKEDDKVFPGGSHTYVWQVLKENGPMASDPLCLTYSYLSHVDLVKDLNSGLIGALLVCREGSLAKEKTQTLHKFILLFAVFDEGKSWHSETKNSLMQDRDAASARAWPKMHTVNGYVNRSLPGLIGCHRKSVYWHVIGMGTTPEVHSIFLEGHTFLVRNHRQASLEISPITFLTAQTLLMDLGQFLLFCHISSHQHDGMEAYVKVDSCPEEPQLRMKNNEEAEDYDDDLTDSEMDVVRFDDDNSPSFIQIRSVAKKHPKTWVHYIAAEEEDWDYAPLVLAPDDRSYKSQYLNNGPQRIGRKYKKVRFMAYTDETFKTREAIQHESGILGPLLYGEVGDTLLIIFKNQASRPYNIYPHGITDVRPLYSRRLPKGVKHLKDFPILPGEIFKYKWTVTVEDGPTKSDPRCLTRYYSSFVNMERDLASGLIGPLLICYKESVDQRGNQIMSDKRNVILFSVFDENRSWYLTENIQRFLPNPAGVQLEDPEFQASNIMHSINGYVFDSLQLSVCLHEVAYWYILSIGAQTDFLSVFFSGYTFKHKMVYEDTLTLFPFSGETVFMSMENPGLWILGCHNSDFRNRGMTALLKVSSCDKNTGDYYEDSYEDISAYLLSKNNAIEPRSFSQNSRHPSTRQKQFNATTIPENDIEKTDPWFAHRTPMPKIQNVSSSDLLMLLRQSPTPHGLSLSDLQEAKYETFSDDPSPGAIDSNNSLSEMTHFRPQLHHSGDMVFTPESGLQLRLNEKLGTTAATELKKLDFKVSSTSNNLISTIPSDNLAAGTDNTSSLGPPSMPVHYDSQLDTTLFGKKSSPLTESGGPLSLSEENNDSKLLESGLMNSQESSWGKNVSSTESGRLFKGKRAHGPALLTKDNALFKVSISLLKTNKTSNNSATNRKTHIDGPSLLIENSPSVWQNILESDTEFKKVTPLIHDRMLMDKNATALRLNHMSNKTTSSKNMEMVQQKKEGPIPPDAQNPDMSFFKMLFLPESARWIQRTHGKNSLNSGQGPSPKQLVSLGPEKSVEGQNFLSEKNKVVVGKGEFTKDVGLKEMVFPSSRNLFLTNLDNLHENNTHNQEKKIQEEIEKKETLIQENVVLPQIHTVTGTKNFMKNLFLLSTRQNVEGSYDGAYAPVLQDFRSLNDSTNRTKKHTAHFSKKGEEENLEGLGNQTKQIVEKYACTTRISPNTSQQNFVTQRSKRALKQFRLPLEETELEKRIIVDDTSTQWSKNMKHLTPSTLTQIDYNEKEKGAITQSPLSDCLTRSHSIPQANRSPLPIAKVSSFPSIRPIYLTRVLFQDNSSHLPAASYRKKDSGVQESSHFLQGAKKNNLSLAILTLEMTGDQREVGSLGTSATNSVTYKKVENTVLPKPDLPKTSGKVELLPKVHIYQKDLFPTETSNGSPGHLDLVEGSLLQGTEGAIKWNEANRPGKVPFLRVATESSAKTPSKLLDPLAWDNHYGTQIPKEEWKSQEKSPEKTAFKKKDTILSLNACESNHAIAAINEGQNKPEIEVTWAKQGRTERLCSQNPPVLKRHQREITRTTLQSDQEEIDYDDTISVEMKKEDFDIYDEDENQSPRSFQKKTRHYFIAAVERLWDYGMSSSPHVLRNRAQSGSVPQFKKVVFQEFTDGSFTQPLYRGELNEHLGLLGPYIRAEVEDNIMVTFRNQASRPYSFYSSLISYEEDQRQGAEPRKNFVKPNETKTYFWKVQHHMAPTKDEFDCKAWAYFSDVDLEKDVHSGLIGPLLVCHTNTLNPAHGRQVTVQEFALFFTIFDETKSWYFTENMERNCRAPCNIQMEDPTFKENYRFHAINGYIMDTLPGLVMAQDQRIRWYLLSMGSNENIHSIHFSGHVFTVRKKEEYKMALYNLYPGVFETVEMLPSKAGIWRVECLIGEHLHAGMSTLFLVYSNKCQTPLGMASGHIRDFQITASGQYGQWAPKLARLHYSGSINAWSTKEPFSWIKVDLLAPMIIHGIKTQGARQKFSSLYISQFIIMYSLDGKKWQTYRGNSTGTLMVFFGNVDSSGIKHNIFNPPIIARYIRLHPTHYSIRSTLRMELMGCDLNSCSMPLGMESKAISDAQITASSYFTNMFATWSPSKARLHLQGRSNAWRPQVNNPKEWLQVDFQKTMKVTGVTTQGVKSLLTSMYVKEFLISSSQDGHQWTLFFQNGKVKVFQGNQDSFTPVVNSLDPPLLTRYLRIHPQSWVHQIALRMEVLGCEAQDLY

SEQ ID NO: 871 - protein, 2621 aa, Artificial Sequence
  Description of Artificial Sequence: Synthetic polypeptide
GTSESATPESGPGSEPATSGSETPGTSESATPESGPGSEPATSGSETPGTSESATPESGPGTSTEPSEGSAPGSPAGSPTSTEEGTSESATPESGPGSEPATSGSETPGTSESATPESGPGSPAGSPTSTEEGSPAGSPTSTEEGTSTEPSEGSAPGTSESATPESGPGTSESATPESGPGTSESATPESGPGSEPATSGSETPGSEPATSGSETPGSPAGSPTSTEEGTSTEPSEGSAPGTSTEPSEGSAPGSEPATSGSETPGTSESATPESGPGTSTEPSEGSAPGATRRYYLGAVELSWDYMQSDLGELPVDARFPPRVPKSFPFNTSVVYKKTLFVEFTDHLFNIAKPRPPWMGLLGPTIQAEVYDTVVITLKNMASHPVSLHAVGVSYWKASEGAEYDDQTSQREKEDDKVFPGGSHTYVWQVLKENGPMASDPLCLTYSYLSHVDLVKDLNSGLIGALLVCREGSLAKEKTQTLHKFILLFAVFDEGKSWHSETKNSLMQDRDAASARAWPKMHTVNGYVNRSLPGLIGCHRKSVYWHVIGMGTTPEVHSIFLEGHTFLVRNHRQASLEISPITFLTAQTLLMDLGQFLLFCHISSHQHDGMEAYVKVDSCPEEPQLRMKNNEEAEDYDDDLTDSEMDVVRFDDDNSPSFIQIRSVAKKHPKTWVHYIAAEEEDWDYAPLVLAPDDRSYKSQYLNNGPQRIGRKYKKVRFMAYTDETFKTREAIQHESGILGPLLYGEVGDTLLIIFKNQASRPYNIYPHGITDVRPLYSRRLPKGVKHLKDFPILPGEIFKYKWTVTVEDGPTKSDPRCLTRYYSSFVNMERDLASGLIGPLLICYKESVDQRGNQIMSDKRNVILFSVFDENRSWYLTENIQRFLPNPAGVQLEDPEFQASNIMHSINGYVFDSLQLSVCLHEVAYWYILSIGAQTDFLSVFFSGYTFKHKMVYEDTLTLFPFSGETVFMSMENPGLWILGCHNSDFRNRGMTALLKVSSCDKNTGDYYEDSYEDISAYLLSKNNAIEPRSFSQNSRHPSTRQKQFNATTIPENDIEKTDPWFAHRTPMPKIQNVSSSDLLMLLRQSPTPHGLSLSDLQEAKYETFSDDPSPGAIDSNNSLSEMTHFRPQLHHSGDMVFTPESGLQLRLNEKLGTTAATELKKLDFKVSSTSNNLISTIPSDNLAAGTDNTSSLGPPSMPVHYDSQLDTTLFGKKSSPLTESGGPLSLSEENNDSKLLESGLMNSQESSWGKNVSSTESGRLFKGKRAHGPALLTKDNALFKVSISLLKTNKTSNNSATNRKTHIDGPSLLIENSPSVWQNILESDTEFKKVTPLIHDRMLMDKNATALRLNHMSNKTTSSKNMEMVQQKKEGPIPPDAQNPDMSFFKMLFLPESARWIQRTHGKNSLNSGQGPSPKQLVSLGPEKSVEGQNFLSEKNKVVVGKGEFTKDVGLKEMVFPSSRNLFLTNLDNLHENNTHNQEKKIQEEIEKKETLIQENVVLPQIHTVTGTKNFMKNLFLLSTRQNVEGSYDGAYAPVLQDFRSLNDSTNRTKKHTAHFSKKGEEENLEGLGNQTKQIVEKYACTTRISPNTSQQNFVTQRSKRALKQFRLPLEETELEKRIIVDDTSTQWSKNMKHLTPSTLTQIDYNEKEKGAITQSPLSDCLTRSHSIPQANRSPLPIAKVSSFPSIRPIYLTRVLFQDNSSHLPAASYRKKDSGVQESSHFLQGAKKNNLSLAILTLEMTGDQREVGSLGTSATNSVTYKKVENTVLPKPDLPKTSGKVELLPKVHIYQKDLFPTETSNGSPGHLDLVEGSLLQGTEGAIKWNEANRPGKVPFLRVATESSAKTPSKLLDPLAWDNHYGTQIPKEEWKSQEKSPEKTAFKKKDTILSLNACESNHAIAAINEGQNKPEIEVTWAKQGRTERLCSQNPPVLKRHQREITRTTLQSDQEEIDYDDTISVEMKKEDFDIYDEDENQSPRSFQKKTRHYFIAAVERLWDYGMSSSPHVLRNRAQSGSVPQFKKVVFQEFTDGSFTQPLYRGELNEHLGLLGPYIRAEVEDNIMVTFRNQASRPYSFYSSLISYEEDQRQGAEPRKNFVKPNETKTYFWKVQHHMAPTKDEFDCKAWAYFSDVDLEKDVHSGLIGPLLVCHTNTLNPAHGRQVTVQEFALFFTIFDETKSWYFTENMERNCRAPCNIQMEDPTFKENYRFHAINGYIMDTLPGLVMAQDQRIRWYLLSMGSNENIHSIHFSGHVFTVRKKEEYKMALYNLYPGVFETVEMLPSKAGIWRVECLIGEHLHAGMSTLFLVYSNKCQTPLGMASGHIRDFQITASGQYGQWAPKLARLHYSGSINAWSTKEPFSWIKVDLLAPMIIHGIKTQGARQKFSSLYISQFIIMYSLDGKKWQTYRGNSTGTLMVFFGNVDSSGIKHNIFNPPIIARYIRLHPTHYSIRSTLRMELMGCDLNSCSMPLGMESKAISDAQITASSYFTNMFATWSPSKARLHLQGRSNAWRPQVNNPKEWLQVDFQKTMKVTGVTTQGVKSLLTSMYVKEFLISSSQDGHQWTLFFQNGKVKVFQGNQDSFTPVVNSLDPPLLTRYLRIHPQSWVHQIALRMEVLGCEAQDLY

SEQ ID NO: 872 - protein, 2909 aa, Artificial Sequence
  Description of Artificial Sequence: Synthetic polypeptide
GSPAGSPTSTEEGTSESATPESGPGTSTEPSEGSAPGSPAGSPTSTEEGTSTEPSEGSAPGTSTEPSEGSAPGTSESATPESGPGSEPATSGSETPGSEPATSGSETPGSPAGSPTSTEEGTSESATPESGPGTSTEPSEGSAPGTSTEPSEGSAPGSPAGSPTSTEEGTSTEPSEGSAPGTSTEPSEGSAPGTSESATPESGPGTSTEPSEGSAPGTSESATPESGPGSEPATSGSETPGTSTEPSEGSAPGTSTEPSEGSAPGTSESATPESGPGTSESATPESGPGSPAGSPTSTEEGTSESATPESGPGSEPATSGSETPGTSESATPESGPGTSTEPSEGSAPGTSTEPSEGSAPGTSTEPSEGSAPGTSTEPSEGSAPGTSTEPSEGSAPGTSTEPSEGSAPGSPAGSPTSTEEGTSTEPSEGSAPGTSESATPESGPGSEPATSGSETPGTSESATPESGPGSEPATSGSETPGTSESATPESGPGTSTEPSEGSAPGTSESATPESGPGSPAGSPTSTEEGSPAGSPTSTEEGSPAGSPTSTEEGTSESATPESGPGTSTEPSEGSAPGATRRYYLGAVELSWDYMQSDLGELPVDARFPPRVPKSFPFNTSVVYKKTLFVEFTDHLFNIAKPRPPWMGLLGPTIQAEVYDTVVITLKNMASHPVSLHAVGVSYWKASEGAEYDDQTSQREKEDDKVFPGGSHTYVWQVLKENGPMASDPLCLTYSYLSHVDLVKDLNSGLIGALLVCREGSLAKEKTQTLHKFILLFAVFDEGKSWHSETKNSLMQDRDAASARAWPKMHTVNGYVNRSLPGLIGCHRKSVYWHVIGMGTTPEVHSIFLEGHTFLVRNHRQASLEISPITFLTAQTLLMDLGQFLLFCHISSHQHDGMEAYVKVDSCPEEPQLRMKNNEEAEDYDDDLTDSEMDVVRFDDDNSPSFIQIRSVAKKHPKTWVHYIAAEEEDWDYAPLVLAPDDRSYKSQYLNNGPQRIGRKYKKVRFMAYTDETFKTREAIQHESGILGPLLYGEVGDTLLIIFKNQASRPYNIYPHGITDVRPLYSRRLPKGVKHLKDFPILPGEIFKYKWTVTVEDGPTKSDPRCLTRYYSSFVNMERDLASGLIGPLLICYKESVDQRGNQIMSDKRNVILFSVFDENRSWYLTENIQRFLPNPAGVQLEDPEFQASNIMHSINGYVFDSLQLSVCLHEVAYWYILSIGAQTDFLSVFFSGYTFKHKMVYEDTLTLFPFSGETVFMSMENPGLWILGCHNSDFRNRGMTALLKVSSCDKNTGDYYEDSYEDISAYLLSKNNAIEPRSFSQNSRHPSTRQKQFNATTIPENDIEKTDPWFAHRTPMPKIQNVSSSDLLMLLRQSPTPHGLSLSDLQEAKYETFSDDPSPGAIDSNNSLSEMTHFRPQLHHSGDMVFTPESGLQLRLNEKLGTTAATELKKLDFKVSSTSNNLISTIPSDNLAAGTDNTSSLGPPSMPVHYDSQLDTTLFGKKSSPLTESGGPLSLSEENNDSKLLESGLMNSQESSWGKNVSSTESGRLFKGKRAHGPALLTKDNALFKVSISLLKTNKTSNNSATNRKTHIDGPSLLIENSPSVWQNILESDTEFKKVTPLIHDRMLMDKNATALRLNHMSNKTTSSKNMEMVQQKKEGPIPPDAQNPDMSFFKMLFLPESARWIQRTHGKNSLNSGQGPSPKQLVSLGPEKSVEGQNFLSEKNKVVVGKGEFTKDVGLKEMVFPSSRNLFLTNLDNLHENNTHNQEKKIQEEIEKKETLIQENVVLPQIHTVTGTKNFMKNLFLLSTRQNVEGSYDGAYAPVLQDFRSLNDSTNRTKKHTAHFSKKGEEENLEGLGNQTKQIVEKYACTTRISPNTSQQNFVTQRSKRALKQFRLPLEETELEKRIIVDDTSTQWSKNMKHLTPSTLTQIDYNEKEKGAITQSPLSDCLTRSHSIPQANRSPLPIAKVSSFPSIRPIYLTRVLFQDNSSHLPAASYRKKDSGVQESSHFLQGAKKNNLSLAILTLEMTGDQREVGSLGTSATNSVTYKKVENTVLPKPDLPKTSGKVELLPKVHIYQKDLFPTETSNGSPGHLDLVEGSLLQGTEGAIKWNEANRPGKVPFLRVATESSAKTPSKLLDPLAWDNHYGTQIPKEEWKSQEKSPEKTAFKKKDTILSLNACESNHAIAAINEGQNKPEIEVTWAKQGRTERLCSQNPPVLKRHQREITRTTLQSDQEEIDYDDTISVEMKKEDFDIYDEDENQSPRSFQKKTRHYFIAAVERLWDYGMSSSPHVLRNRAQSGSVPQFKKVVFQEFTDGSFTQPLYRGELNEHLGLLGPYIRAEVEDNIMVTFRNQASRPYSFYSSLISYEEDQRQGAEPRKNFVKPNETKTYFWKVQHHMAPTKDEFDCKAWAYFSDVDLEKDVHSGLIGPLLVCHTNTLNPAHGRQVTVQEFALFFTIFDETKSWYFTENMERNCRAPCNIQMEDPTFKENYRFHAINGYIMDTLPGLVMAQDQRIRWYLLSMGSNENIHSIHFSGHVFTVRKKEEYKMALYNLYPGVFETVEMLPSKAGIWRVECLIGEHLHAGMSTLFLVYSNKCQTPLGMASGHIRDFQITASGQYGQWAPKLARLHYSGSINAWSTKEPFSWIKVDLLAPMIIHGIKTQGARQKFSSLYISQFIIMYSLDGKKWQTYRGNSTGTLMVFFGNVDSSGIKHNIFNPPIIARYIRLHPTHYSIRSTLRMELMGCDLNSCSMPLGMESKAISDAQITASSYFTNMFATWSPSKARLHLQGRSNAWRPQVNNPKEWLQVDFQKTMKVTGVTTQGVKSLLTSMYVKEFLISSSQDGHQWTLFFQNGKVKVFQGNQDSFTPVVNSLDPPLLTRYLRIHPQSWVHQIALRMEVLGCEAQDLY

SEQ ID NO: 873 - protein, 2909 aa, Artificial Sequence
  Description of Artificial Sequence: Synthetic polypeptide
GSTSSTAESPGPGSTSSTAESPGPGSTSESPSGTAPGSTSSTAESPGPGSTSSTAESPGPGTSTPESGSASPGSTSESPSGTAPGTSPSGESSTAPGSTSESPSGTAPGSTSESPSGTAPGTSPSGESSTAPGSTSESPSGTAPGSTSESPSGTAPGTSPSGESSTAPGSTSESPSGTAPGSTSESPSGTAPGSTSESPSGTAPGTSTPESGSASPGSTSESPSGTAPGTSTPESGSASPGSTSSTAESPGPGSTSSTAESPGPGTSTPESGSASPGTSTPESGSASPGSTSESPSGTAPGTSTPESGSASPGTSTPESGSASPGSTSESPSGTAPGSTSESPSGTAPGSTSESPSGTAPGSTSSTAESPGPGTSTPESGSASPGTSTPESGSASPGSTSESPSGTAPGSTSESPSGTAPGTSTPESGSASPGSTSESPSGTAPGSTSESPSGTAPGTSTPESGSASPGTSPSGESSTAPGSTSSTAESPGPGTSPSGESSTAPGSTSSTAESPGPGTSTPESGSASPGSTSESPSGTAPGSTSSTAESPGPGTSTPESGSASPGTSTPESGSASPGATRRYYLGAVELSWDYMQSDLGELPVDARFPPRVPKSFPFNTSVVYKKTLFVEFTDHLFNIAKPRPPWMGLLGPTIQAEVYDTVVITLKNMASHPVSLHAVGVSYWKASEGAEYDDQTSQREKEDDKVFPGGSHTYVWQVLKENGPMASDPLCLTYSYLSHVDLVKDLNSGLIGALLVCREGSLAKEKTQTLHKFILLFAVFDEGKSWHSETKNSLMQDRDAASARAWPKMHTVNGYVNRSLPGLIGCHRKSVYWHVIGMGTTPEVHSIFLEGHTFLVRNHRQASLEISPITFLTAQTLLMDLGQFLLFCHISSHQHDGMEAYVKVDSCPEEPQLRMKNNEEAEDYDDDLTDSEMDVVRFDDDNSPSFIQIRSVAKKHPKTWVHYIAAEEEDWDYAPLVLAPDDRSYKSQYLNNGPQRIGRKYKKVRFMAYTDETFKTREAIQHESGILGPLLYGEVGDTLLIIFKNQASRPYNIYPHGITDVRPLYSRRLPKGVKHLKDFPILPGEIFKYKWTVTVEDGPTKSDPRCLTRYYSSFVNMERDLASGLIGPLLICYKESVDQRGNQIMSDKRNVILFSVFDENRSWYLTENIQRFLPNPAGVQLEDPEFQASNIMHSINGYVFDSLQLSVCLHEVAYWYILSIGAQTDFLSVFFSGYTFKHKMVYEDTLTLFPFSGETVFMSMENPGLWILGCHNSDFRNRGMTALLKVSSCDKNTGDYYEDSYEDISAYLLSKNNAIEPRSFSQNSRHPSTRQKQFNATTIPENDIEKTDPWFAHRTPMPKIQNVSSSDLLMLLRQSPTPHGLSLSDLQEAKYETFSDDPSPGAIDSNNSLSEMTHFRPQLHHSGDMVFTPESGLQLRLNEKLGTTAATELKKLDFKVSSTSNNLISTIPSDNLAAGTDNTSSLGPPSMPVHYDSQLDTTLFGKKSSPLTESGGPLSLSEENNDSKLLESGLMNSQESSWGKNVSSTESGRLFKGKRAHGPALLTKDNALFKVSISLLKTNKTSNNSATNRKTHIDGPSLLIENSPSVWQNILESDTEFKKVTPLIHDRMLMDKNATALRLNHMSNKTTSSKNMEMVQQKKEGPIPPDAQNPDMSFFKMLFLPESARWIQRTHGKNSLNSGQGPSPKQLVSLGPEKSVEGQNFLSEKNKVVVGKGEFTKDVGLKEMVFPSSRNLFLTNLDNLHENNTHNQEKKIQEEIEKKETLIQENVVLPQIHTVTGTKNFMKNLFLLSTRQNVEGSYDGAYAPVLQDFRSLNDSTNRTKKHTAHFSKKGEEENLEGLGNQTKQIVEKYACTTRISPNTSQQNFVTQRSKRALKQFRLPLEETELEKRIIVDDTSTQWSKNMKHLTPSTLTQIDYNEKEKGAITQSPLSDCLTRSHSIPQANRSPLPIAKVSSFPSIRPIYLTRVLFQDNSSHLPAASYRKKDSGVQESSHFLQGAKKNNLSLAILTLEMTGDQREVGSLGTSATNSVTYKKVENTVLPKPDLPKTSGKVELLPKVHIYQKDLFPTETSNGSPGHLDLVEGSLLQGTEGAIKWNEANRPGKVPFLRVATESSAKTPSKLLDPLAWDNHYGTQIPKEEWKSQEKSPEKTAFKKKDTILSLNACESNHAIAAINEGQNKPEIEVTWAKQGRTERLCSQNPPVLKRHQREITRTTLQSDQEEIDYDDTISVEMKKEDFDIYDEDENQSPRSFQKKTRHYFIAAVERLWDYGMSSSPHVLRNRAQSGSVPQFKKVVFQEFTDGSFTQPLYRGELNEHLGLLGPYIRAEVEDNIMVTFRNQASRPYSFYSSLISYEEDQRQGAEPRKNFVKPNETKTYFWKVQHHMAPTKDEFDCKAWAYFSDVDLEKDVHSGLIGPLLVCHTNTLNPAHGRQVTVQEFALFFTIFDETKSWYFTENMERNCRAPCNIQMEDPTFKENYRFHAINGYIMDTLPGLVMAQDQRIRWYLLSMGSNENIHSIHFSGHVFTVRKKEEYKMALYNLYPGVFETVEMLPSKAGIWRVECLIGEHLHAGMSTLFLVYSNKCQTPLGMASGHIRDFQITASGQYGQWAPKLARLHYSGSINAWSTKEPFSWIKVDLLAPMIIHGIKTQGARQKFSSLYISQFIIMYSLDGKKWQTYRGNSTGTLMVFFGNVDSSGIKHNIFNPPIIARYIRLHPTHYSIRSTLRMELMGCDLNSCSMPLGMESKAISDAQITASSYFTNMFATWSPSKARLHLQGRSNAWRPQVNNPKEWLQVDFQKTMKVTGVTTQGVKSLLTSMYVKEFLISSSQDGHQWTLFFQNGKVKVFQGNQDSFTPVVNSLDPPLLTRYLRIHPQSWVHQIALRMEVLGCEAQDLY

SEQ ID NO: 874 - protein, 3197 aa, Artificial Sequence
  Description of Artificial Sequence: Synthetic polypeptide
GSPAGSPTSTEEGTSESATPESGPGTSTEPSEGSAPGSPAGSPTSTEEGTSTEPSEGSAPGTSTEPSEGSAPGTSESATPESGPGSEPATSGSETPGSEPATSGSETPGSPAGSPTSTEEGTSESATPESGPGTSTEPSEGSAPGTSTEPSEGSAPGSPAGSPTSTEEGTSTEPSEGSAPGTSTEPSEGSAPGTSESATPESGPGTSTEPSEGSAPGTSESATPESGPGSEPATSGSETPGTSTEPSEGSAPGTSTEPSEGSAPGTSESATPESGPGTSESATPESGPGSPAGSPTSTEEGTSESATPESGPGSEPATSGSETPGTSESATPESGPGTSTEPSEGSAPGTSTEPSEGSAPGTSTEPSEGSAPGTSTEPSEGSAPGTSTEPSEGSAPGTSTEPSEGSAPGSPAGSPTSTEEGTSTEPSEGSAPGTSESATPESGPGSEPATSGSETPGTSESATPESGPGSEPATSGSETPGTSESATPESGPGTSTEPSEGSAPGTSESATPESGPGSPAGSPTSTEEGSPAGSPTSTEEGSPAGSPTSTEEGTSESATPESGPGTSTEPSEGSAPGTSESATPESGPGSEPATSGSETPGTSESATPESGPGSEPATSGSETPGTSESATPESGPGTSTEPSEGSAPGSPAGSPTSTEEGTSESATPESGPGSEPATSGSETPGTSESATPESGPGSPAGSPTSTEEGSPAGSPTSTEEGTSTEPSEGSAPGTSESATPESGPGTSESATPESGPGTSESATPESGPGSEPATSGSETPGSEPATSGSETPGSPAGSPTSTEEGTSTEPSEGSAPGTSTEPSEGSAPGSEPATSGSETPGTSESATPESGPGTSTEPSEGSAPGATRRYYLGAVELSWDYMQSDLGELPVDARFPPRVPKSFPFNTSVVYKKTLFVEFTDHLFNIAKPRPPWMGLLGPTIQAEVYDTVVITLKNMASHPVSLHAVGVSYWKASEGAEYDDQTSQREKEDDKVFPGGSHTYVWQVLKENGPMASDPLCLTYSYLSHVDLVKDLNSGLIGALLVCREGSLAKEKTQTLHKFILLFAVFDEGKSWHSETKNSLMQDRDAASARAWPKMHTVNGYVNRSLPGLIGCHRKSVYWHVIGMGTTPEVHSIFLEGHTFLVRNHRQASLEISPITFLTAQTLLMDLGQFLLFCHISSHQHDGMEAYVKVDSCPEEPQLRMKNNEEAEDYDDDLTDSEMDVVRFDDDNSPSFIQIRSVAKKHPKTWVHYIAAEEEDWDYAPLVLAPDDRSYKSQYLNNGPQRIGRKYKKVRFMAYTDETFKTREAIQHESGILGPLLYGEVGDTLLIIFKNQASRPYNIYPHGITDVRPLYSRRLPKGVKHLKDFPILPGEIFKYKWTVTVEDGPTKSDPRCLTRYYSSFVNMERDLASGLIGPLLICYKESVDQRGNQIMSDKRNVILFSVFDENRSWYLTENIQRFLPNPAGVQLEDPEFQASNIMHSINGYVFDSLQLSVCLHEVAYWYILSIGAQTDFLSVFFSGYTFKHKMVYEDTLTLFPFSGETVFMSMENPGLWILGCHNSDFRNRGMTALLKVSSCDKNTGDYYEDSYEDISAYLLSKNNAIEPRSFSQNSRHPSTRQKQFNATTIPENDIEKTDPWFAHRTPMPKIQNVSSSDLLMLLRQSPTPHGLSLSDLQEAKYETFSDDPSPGAIDSNNSLSEMTHFRPQLHHSGDMVFTPESGLQLRLNEKLGTTAATELKKLDFKVSSTSNNLISTIPSDNLAAGTDNTSSLGPPSMPVHYDSQLDTTLFGKKSSPLTESGGPLSLSEENNDSKLLESGLMNSQESSWGKNVSSTESGRLFKGKRAHGPALLTKDNALFKVSISLLKTNKTSNNSATNRKTHIDGPSLLIENSPSVWQNILESDTEFKKVTPLIHDRMLMDKNATALRLNHMSNKTTSSKNMEMVQQKKEGPIPPDAQNPDMSFFKMLFLPESARWIQRTHGKNSLNSGQGPSPKQLVSLGPEKSVEGQNFLSEKNKVVVGKGEFTKDVGLKEMVFPSSRNLFLTNLDNLHENNTHNQEKKIQEEIEKKETLIQENVVLPQIHTVTGTKNFMKNLFLLSTRQNVEGSYDGAYAPVLQDFRSLNDSTNRTKKHTAHFSKKGEEENLEGLGNQTKQIVEKYACTTRISPNTSQQNFVTQRSKRALKQFRLPLEETELEKRIIVDDTSTQWSKNMKHLTPSTLTQIDYNEKEKGAITQSPLSDCLTRSHSIPQANRSPLPIAKVSSFPSIRPIYLTRVLFQDNSSHLPAASYRKKDSGVQESSHFLQGAKKNNLSLAILTLEMTGDQREVGSLGTSATNSVTYKKVENTVLPKPDLPKTSGKVELLPKVHIYQKDLFPTETSNGSPGHLDLVEGSLLQGTEGAIKWNEANRPGKVPFLRVATESSAKTPSKLLDPLAWDNHYGTQIPKEEWKSQEKSPEKTAFKKKDTILSLNACESNHAIAAINEGQNKPEIEVTWAKQGRTERLCSQNPPVLKRHQREITRTTLQSDQEEIDYDDTISVEMKKEDFDIYDEDENQSPRSFQKKTRHYFIAAVERLWDYGMSSSPHVLRNRAQSGSVPQFKKVVFQEFTDGSFTQPLYRGELNEHLGLLGPYIRAEVEDNIMVTFRNQASRPYSFYSSLISYEEDQRQGAEPRKNFVKPNETKTYFWKVQHHMAPTKDEFDCKAWAYFSDVDLEKDVHSGLIGPLLVCHTNTLNPAHGRQVTVQEFALFFTIFDETKSWYFTENMERNCRAPCNIQMEDPTFKENYRFHAINGYIMDTLPGLVMAQDQRIRWYLLSMGSNENIHSIHFSGHVFTVRKKEEYKMALYNLYPGVFETVEMLPSKAGIWRVECLIGEHLHAGMSTLFLVYSNKCQTPLGMASGHIRDFQITASGQYGQWAPKLARLHYSGSINAWSTKEPFSWIKVDLLAPMIIHGIKTQGARQKFSSLYISQFIIMYSLDGKKWQTYRGNSTGTLMVFFGNVDSSGIKHNIFNPPIIARYIRLHPTHYSIRSTLRMELMGCDLNSCSMPLGMESKAISDAQITASSYFTNMFATWSPSKARLHLQGRSNAWRPQVNNPKEWLQVDFQKTMKVTGVTTQGVKSLLTSMYVKEFLISSSQDGHQWTLFFQNGKVKVFQGNQDSFTPVVNSLDPPLLTRYLRIHPQSWVHQIALRMEVLGCEAQDLY

SEQ ID NO: 875 - protein, 3208 aa, Artificial Sequence
  Description of Artificial Sequence: Synthetic polypeptide
  MOD_RES (430)..(432): Any amino acid
  MOD_RES (443)..(446): Any amino acid
GSTSESPSGTAPGTSPSGESSTAPGSTSESPSGTAPGSTSESPSGTAPGTSTPESGSASPGTSTPESGSASPGSTSESPSGTAPGSTSESPSGTAPGTSPSGESSTAPGSTSESPSGTAPGTSPSGESSTAPGTSPSGESSTAPGSTSSTAESPGPGTSPSGESSTAPGTSPSGESSTAPGSTSSTAESPGPGTSTPESGSASPGTSTPESGSASPGSTSESPSGTAPGSTSESPSGTAPGTSTPESGSASPGSTSSTAESPGPGTSTPESGSASPGSTSESPSGTAPGTSPSGESSTAPGSTSSTAESPGPGTSPSGESSTAPGTSTPESGSASPGSTSSTAESPGPGSTSSTAESPGPGSTSSTAESPGPGSTSSTAESPGPGTSPSGESSTAPGSTSESPSGTAPGSTSESPSGTAPGTSTPESGPXXXGASASGAPSTXXXXSESPSGTAPGSTSESPSGTAPGSTSESPSGTAPGSTSESPSGTAPGSTSESPSGTAPGSTSESPSGTAPGTSTPESGSASPGTSPSGESSTAPGTSPSGESSTAPGSTSSTAESPGPGTSPSGESSTAPGTSTPESGSASPGSTSESPSGTAPGSTSESPSGTAPGTSPSGESSTAPGSTSESPSGTAPGTSTPESGSASPGTSTPESGSASPGSTSESPSGTAPGTSTPESGSASPGSTSSTAESPGPGSTSESPSGTAPGSTSESPSGTAPGTSPSGESSTAPGSTSSTAESPGPGTSPSGESSTAPGTSTPESGSASPGTSPSGESSTAPGTSPSGESSTAPGTSPSGESSTAPGSTSSTAESPGPGSTSSTAESPGPGTSPSGESSTAPGSSPSASTGTGPGSSTPSGATGSPGSSTPSGATGSPGATRRYYLGAVELSWDYMQSDLGELPVDARFPPRVPKSFPFNTSVVYKKTLFVEFTDHLFNIAKPRPPWMGLLGPTIQAEVYDTVVITLKNMASHPVSLHAVGVSYWKASEGAEYDDQTSQREKEDDKVFPGGSHTYVWQVLKENGPMASDPLCLTYSYLSHVDLVKDLNSGLIGALLVCREGSLAKEKTQTLHKFILLFAVFDEGKSWHSETKNSLMQDRDAASARAWPKMHTVNGYVNRSLPGLIGCHRKSVYWHVIGMGTTPEVHSIFLEGHTFLVRNHRQASLEISPITFLTAQTLLMDLGQFLLFCHISSHQHDGMEAYVKVDSCPEEPQLRMKNNEEAEDYDDDLTDSEMDVVRFDDDNSPSFIQIRSVAKKHPKTWVHYIAAEEEDWDYAPLVLAPDDRSYKSQYLNNGPQRIGRKYKKVRFMAYTDETFKTREAIQHESGILGPLLYGEVGDTLLIIFKNQASRPYNIYPHGITDVRPLYSRRLPKGVKHLKDFPILPGEIFKYKWTVTVEDGPTKSDPRCLTRYYSSFVNMERDLASGLIGPLLICYKESVDQRGNQIMSDKRNVILFSVFDENRSWYLTENIQRFLPNPAGVQLEDPEFQASNIMHSINGYVFDSLQLSVCLHEVAYWYILSIGAQTDFLSVFFSGYTFKHKMVYEDTLTLFPFSGETVFMSMENPGLWILGCHNSDFRNRGMTALLKVSSCDKNTGDYYEDSYEDISAYLLSKNNAIEPRSFSQNSRHPSTRQKQFNATTIPENDIEKTDPWFAHRTPMPKIQNVSSSDLLMLLRQSPTPHGLSLSDLQEAKYETFSDDPSPGAIDSNNSLSEMTHFRPQLHHSGDMVFTPESGLQLRLNEKLGTTAATELKKLDFKVSSTSNNLISTIPSDNLAAGTDNTSSLGPPSMPVHYDSQLDTTLFGKKSSPLTESGGPLSLSEENNDSKLLESGLMNSQESSWGKNVSSTESGRLFKGKRAHGPALLTKDNALFKVSISLLKTNKTSNNSATNRKTHIDGPSLLIENSPSVWQNILESDTEFKKVTPLIHDRMLMDKNATALRLNHMSNKTTSSKNMEMVQQKKEGPIPPDAQNPDMSFFKMLFLPESARWIQRTHGKNSLNSGQGPSPKQLVSLGPEKSVEGQNFLSEKNKVVVGKGEFTKDVGLKEMVFPSSRNLFLTNLDNLHENNTHNQEKKIQEEIEKKETLIQENVVLPQIHTVTGTKNFMKNLFLLSTRQNVEGSYDGAYAPVLQDFRSLNDSTNRTKKHTAHFSKKGEEENLEGLGNQTKQIVEKYACTTRISPNTSQQNFVTQRSKRALKQFRLPLEETELEKRIIVDDTSTQWSKNMKHLTPSTLTQIDYNEKEKGAITQSPLSDCLTRSHSIPQANRSPLPIAKVSSFPSIRPIYLTRVLFQDNSSHLPAASYRKKDSGVQESSHFLQGAKKNNLSLAILTLEMTGDQREVGSLGTSATNSVTYKKVENTVLPKPDLPKTSGKVELLPKVHIYQKDLFPTETSNGSPGHLDLVEGSLLQGTEGAIKWNEANRPGKVPFLRVATESSAKTPSKLLDPLAWDNHYGTQIPKEEWKSQEKSPEKTAFKKKDTILSLNACESNHAIAAINEGQNKPEIEVTWAKQGRTERLCSQNPPVLKRHQREITRTTLQSDQEEIDYDDTISVEMKKEDFDIYDEDENQSPRSFQKKTRHYFIAAVERLWDYGMSSSPHVLRNRAQSGSVPQFKKVVFQEFTDGSFTQPLYRGELNEHLGLLGPYIRAEVEDNIMVTFRNQASRPYSFYSSLISYEEDQRQGAEPRKNFVKPNETKTYFWKVQHHMAPTKDEFDCKAWAYFSDVDLEKDVHSGLIGPLLVCHTNTLNPAHGRQVTVQEFALFFTIFDETKSWYFTENMERNCRAPCNIQMEDPTFKENYRFHAINGYIMDTLPGLVMAQDQRIRWYLLSMGSNENIHSIHFSGHVFTVRKKEEYKMALYNLYPGVFETVEMLPSKAGIWRVECLIGEHLHAGMSTLFLVYSNKCQTPLGMASGHIRDFQITASGQYGQWAPKLARLHYSGSINAWSTKEPFSWIKVDLLAPMIIHGIKTQGARQKFSSLYISQFIIMYSLDGKKWQTYRGNSTGTLMVFFGNVDSSGIKHNIFNPPIIARYIRLHPTHYSIRSTLRMELMGCDLNSCSMPLGMESKAISDAQITASSYFTNMFATWSPSKARLHLQGRSNAWRPQVNNPKEWLQVDFQKTMKVTGVTTQGVKSLLTSMYVKEFLISSSQDGHQWTLFFQNGKVKVFQGNQDSFTPVVNSLDPPLLTRYLRIHPQSWVHQIALRMEVLGCEAQDLY

SEQ ID NO: 876 - protein, 3197 aa, Artificial Sequence
  Description of Artificial Sequence: Synthetic polypeptide
GASPGTSSTGSPGSSPSASTGTGPGSSPSASTGTGPGTPGSGTASSSPGSSTPSGATGSPGSNPSASTGTGPGASPGTSSTGSPGTPGSGTASSSPGSSTPSGATGSPGTPGSGTASSSPGASPGTSSTGSPGASPGTSSTGSPGTPGSGTASSSPGSSTPSGATGSPGASPGTSSTGSPGTPGSGTASSSPGSSTPSGATGSPGSNPSASTGTGPGSSPSASTGTGPGSSTPSGATGSPGSSTPSGATGSPGASPGTSSTGSPGASPGTSSTGSPGASPGTSSTGSPGTPGSGTASSSPGASPGTSSTGSPGASPGTSSTGSPGASPGTSSTGSPGSSPSASTGTGPGTPGSGTASSSPGASPGTSSTGSPGASPGTSSTGSPGASPGTSSTGSPGSSTPSGATGSPGSSTPSGATGSPGASPGTSSTGSPGTPGSGTASSSPGSSTPSGATGSPGSSTPSGATGSPGSSTPSGATGSPGSSPSASTGTGPGASPGTSSTGSPGASPGTSSTGSPGTPGSGTASSSPGASPGTSSTGSPGASPGTSSTGSPGASPGTSSTGSPGASPGTSSTGSPGTPGSGTASSSPGSSTPSGATGSPGTPGSGTASSSPGSSTPSGATGSPGTPGSGTASSSPGSSTPSGATGSPGSSTPSGATGSPGSSPSASTGTGPGSSPSASTGTGPGASPGTSSTGSPGTPGSGTASSSPGSSTPSGATGSPGSSPSASTGTGPGSSPSASTGTGPGASPGTSSTGSPGASPGTSSTGSPGSSTPSGATGSPGSSPSASTGTGPGASPGTSSTGSPGSSPSASTGTGPGTPGSGTASSSPGSSTPSGATGSPGSSTPSGATGSPGASPGTSSTGSPGATRRYYLGAVELSWDYMQSDLGELPVDARFPPRVPKSFPFNTSVVYKKTLFVEFTDHLFNIAKPRPPWMGLLGPTIQAEVYDTVVITLKNMASHPVSLHAVGVSYWKASEGAEYDDQTSQREKEDDKVFPGGSHTYVWQVLKENGPMASDPLCLTYSYLSHVDLVKDLNSGLIGALLVCREGSLAKEKTQTLHKFILLFAVFDEGKSWHSETKNSLMQDRDAASARAWPKMHTVNGYVNRSLPGLIGCHRKSVYWHVIGMGTTPEVHSIFLEGHTFLVRNHRQASLEISPITFLTAQTLLMDLGQFLLFCHISSHQHDGMEAYVKVDSCPEEPQLRMKNNEEAEDYDDDLTDSEMDVVRFDDDNSPSFIQIRSVAKKHPKTWVHYIAAEEEDWDYAPLVLAPDDRSYKSQYLNNGPQRIGRKYKKVRFMAYTDETFKTREAIQHESGILGPLLYGEVGDTLLIIFKNQASRPYNIYPHGITDVRPLYSRRLPKGVKHLKDFPILPGEIFKYKWTVTVEDGPTKSDPRCLTRYYSSFVNMERDLASGLIGPLLICYKESVDQRGNQIMSDKRNVILFSVFDENRSWYLTENIQRFLPNPAGVQLEDPEFQASNIMHSINGYVFDSLQLSVCLHEVAYWYILSIGAQTDFLSVFFSGYTFKHKMVYEDTLTLFPFSGETVFMSMENPGLWILGCHNSDFRNRGMTALLKVSSCDKNTGDYYEDSYEDISAYLLSKNNAIEPRSFSQNSRHPSTRQKQFNATTIPENDIEKTDPWFAHRTPMPKIQNVSSSDLLMLLRQSPTPHGLSLSDLQEAKYETFSDDPSPGAIDSNNSLSEMTHFRPQLHHSGDMVFTPESGLQLRLNEKLGTTAATELKKLDFKVSSTSNNLISTIPSDNLAAGTDNTSSLGPPSMPVHYDSQLDTTLFGKKSSPLTESGGPLSLSEENNDSKLLESGLMNSQESSWGKNVSSTESGRLFKGKRAHGPALLTKDNALFKVSISLLKTNKTSNNSATNRKTHIDGPSLLIENSPSVWQNILESDTEFKKVTPLIHDRMLMDKNATALRLNHMSNKTTSSKNMEMVQQKKEGPIPPDAQNPDMSFFKMLFLPESARWIQRTHGKNSLNSGQGPSPKQLVSLGPEKSVEGQNFLSEKNKVVVGKGEFTKDVGLKEMVFPSSRNLFLTNLDNLHENNTHNQEKKIQEEIEKKETLIQENVVLPQIHTVTGTKNFMKNLFLLSTRQNVEGSYDGAYAPVLQDFRSLNDSTNRTKKHTAHFSKKGEEENLEGLGNQTKQIVEKYACTTRISPNTSQQNFVTQRSKRALKQFRLPLEETELEKRIIVDDTSTQWSKNMKHLTPSTLTQIDYNEKEKGAITQSPLSDCLTRSHSIPQANRSPLPIAKVSSFPSIRPIYLTRVLFQDNSSHLPAASYRKKDSGVQESSHFLQGAKKNNLSLAILTLEMTGDQREVGSLGTSATNSVTYKKVENTVLPKPDLPKTSGKVELLPKVHIYQKDLFPTETSNGSPGHLDLVEGSLLQGTEGAIKWNEANRPGKVPFLRVATESSAKTPSKLLDPLAWDNHYGTQIPKEEWKSQEKSPEKTAFKKKDTILSLNACESNHAIAAINEGQNKPEIEVTWAKQGRTERLCSQNPPVLKRHQREITRTTLQSDQEEIDYDDTISVEMKKEDFDIYDEDENQSPRSFQKKTRHYFIAAVERLWDYGMSSSPHVLRNRAQSGSVPQFKKVVFQEFTDGSFTQPLYRGELNEHLGLLGPYIRAEVEDNIMVTFRNQASRPYSFYSSLISYEEDQRQGAEPRKNFVKPNETKTYFWKVQHHMAPTKDEFDCKAWAYFSDVDLEKDVHSGLIGPLLVCHTNTLNPAHGRQVTVQEFALFFTIFDETKSWYFTENMERNCRAPCNIQMEDPTFKENYRFHAINGYIMDTLPGLVMAQDQRIRWYLLSMGSNENIHSIHFSGHVFTVRKKEEYKMALYNLYPGVFETVEMLPSKAGIWRVECLIGEHLHAGMSTLFLVYSNKCQTPLGMASGHIRDFQITASGQYGQWAPKLARLHYSGSINAWSTKEPFSWIKVDLLAPMIIHGIKTQGARQKFSSLYISQFIIMYSLDGKKWQTYRGNSTGTLMVFFGNVDSSGIKHNIFNPPIIARYIRLHPTHYSIRSTLRMELMGCDLNSCSMPLGMESKAISDAQITASSYFTNMFATWSPSKARLHLQGRSNAWRPQVNNPKEWLQVDFQKTMKVTGVTTQGVKSLLTSMYVKEFLISSSQDGHQWTLFFQNGKVKVFQGNQDSFTPVVNSLDPPLLTRYLRIHPQSWVHQIALRMEVLGCEAQDLY

SEQ ID NO: 877 - protein, 3208 aa, Artificial Sequence
  Description of Artificial Sequence: Synthetic polypeptide
GTSTEPSEGSAPGSEPATSGSETPGSPAGSPTSTEEGSTSSTAESPGPGTSTPESGSASPGSTSESPSGTAPGSTSESPSGTAPGTSTPESGSASPGTSTPESGSASPGSEPATSGSETPGTSESATPESGPGSPAGSPTSTEEGTSTEPSEGSAPGTSESATPESGPGTSTEPSEGSAPGTSTEPSEGSAPGSPAGSPTSTEEGTSTEPSEGSAPGTSTEPSEGSAPGTSESATPESGPGTSESATPESGPGTSTEPSEGSAPGTSTEPSEGSAPGTSESATPESGPGTSTEPSEGSAPGSEPATSGSETPGSPAGSPTSTEEGSSTPSGATGSPGTPGSGTASSSPGSSTPSGATGSPGTSTEPSEGSAPGTSTEPSEGSAPGSEPATSGSETPGSPAGSPTSTEEGSPAGSPTSTEEGTSTEPSEGSAPGASASGAPSTGGTSESATPESGPGSPAGSPTSTEEGSPAGSPTSTEEGSTSSTAESPGPGSTSESPSGTAPGTSPSGESSTAPGTPGSGTASSSPGSSTPSGATGSPGSSPSASTGTGPGSEPATSGSETPGTSESATPESGPGSEPATSGSETPGSTSSTAESPGPGSTSSTAESPGPGTSPSGESSTAPGSEPATSGSETPGSEPATSGSETPGTSTEPSEGSAPGSTSSTAESPGPGTSTPESGSASPGSTSESPSGTAPGTSTEPSEGSAPGTSTEPSEGSAPGTSTEPSEGSAPGSSTPSGATGSPGSSPSASTGTGPGASPGTSSTGSPGSEPATSGSETPGTSESATPESGPGSPAGSPTSTEEGSSTPSGATGSPGSSPSASTGTGPGASPGTSSTGSPGTSESATPESGPGTSTEPSEGSAPGTSTEPSEGSAPGATRRYYLGAVELSWDYMQSDLGELPVDARFPPRVPKSFPFNTSVVYKKTLFVEFTDHLFNIAKPRPPWMGLLGPTIQAEVYDTVVITLKNMASHPVSLHAVGVSYWKASEGAEYDDQTSQREKEDDKVFPGGSHTYVWQVLKENGPMASDPLCLTYSYLSHVDLVKDLNSGLIGALLVCREGSLAKEKTQTLHKFILLFAVFDEGKSWHSETKNSLMQDRDAASARAWPKMHTVNGYVNRSLPGLIGCHRKSVYWHVIGMGTTPEVHSIFLEGHTFLVRNHRQASLEISPITFLTAQTLLMDLGQFLLFCHISSHQHDGMEAYVKVDSCPEEPQLRMKNNEEAEDYDDDLTDSEMDVVRFDDDNSPSFIQIRSVAKKHPKTWVHYIAAEEEDWDYAPLVLAPDDRSYKSQYLNNGPQRIGRKYKKVRFMAYTDETFKTREAIQHESGILGPLLYGEVGDTLLIIFKNQASRPYNIYPHGITDVRPLYSRRLPKGVKHLKDFPILPGEIFKYKWTVTVEDGPTKSDPRCLTRYYSSFVNMERDLASGLIGPLLICYKESVDQRGNQIMSDKRNVILFSVFDENRSWYLTENIQRFLPNPAGVQLEDPEFQASNIMHSINGYVFDSLQLSVCLHEVAYWYILSIGAQTDFLSVFFSGYTFKHKMVYEDTLTLFPFSGETVFMSMENPGLWILGCHNSDFRNRGMTALLKVSSCDKNTGDYYEDSYEDISAYLLSKNNAIEPRSFSQNSRHPSTRQKQFNATTIPENDIEKTDPWFAHRTPMPKIQNVSSSDLLMLLRQSPTPHGLSLSDLQEAKYETFSDDPSPGAIDSNNSLSEMTHFRPQLHHSGDMVFTPESGLQLRLNEKLGTTAATELKKLDFKVSSTSNNLISTIPSDNLAAGTDNTSSLGPPSMPVHYDSQLDTTLFGKKSSPLTESGGPLSLSEENNDSKLLESGLMNSQESSWGKNVSSTESGRLFKGKRAHGPALLTKDNALFKVSISLLKTNKTSNNSATNRKTHIDGPSLLIENSPSVWQNILESDTEFKKVTPLIHDRMLMDKNATALRLNHMSNKTTSSKNMEMVQQKKEGPIPPDAQNPDMSFFKMLFLPESARWIQRTHGKNSLNSGQGPSPKQLVSLGPEKSVEGQNFLSEKNKVVVGKGEFTKDVGLKEMVFPSSRNLFLTNLDNLHENNTHNQEKKIQEEIEKKETLIQENVVLPQIHTVTGTKNFMKNLFLLSTRQNVEGSYDGAYAPVLQDFRSLNDSTNRTKKHTAHFSKKGEEENLEGLGNQTKQIVEKYACTTRISPNTSQQNFVTQRSKRALKQFRLPLEETELEKRIIVDDTSTQWSKNMKHLTPSTLTQIDYNEKEKGAITQSPLSDCLTRSHSIPQANRSPLPIAKVSSFPSIRPIYLTRVLFQDNSSHLPAASYRKKDSGVQESSHFLQGAKKNNLSLAILTLEMTGDQREVGSLGTSATNSVTYKKVENTVLPKPDLPKTSGKVELLPKVHIYQKDLFPTETSNGSPGHLDLVEGSLLQGTEGAIKWNEANRPGKVPFLRVATESSAKTPSKLLDPLAWDNHYGTQIPKEEWKSQEKSPEKTAFKKKDTILSLNACESNHAIAAINEGQNKPEIEVTWAKQGRTERLCSQNPPVLKRHQREITRTTLQSDQEEIDYDDTISVEMKKEDFDIYDEDENQSPRSFQKKTRHYFIAAVERLWDYGMSSSPHVLRNRAQSGSVPQFKKVVFQEFTDGSFTQPLYRGELNEHLGLLGPYIRAEVEDNIMVTFRNQASRPYSFYSSLISYEEDQRQGAEPRKNFVKPNETKTYFWKVQHHMAPTKDEFDCKAWAYFSDVDLEKDVHSGLIGPLLVCHTNTLNPAHGRQVTVQEFALFFTIFDETKSWYFTENMERNCRAPCNIQMEDPTFKENYRFHAINGYIMDTLPGLVMAQDQRIRWYLLSMGSNENIHSIHFSGHVFTVRKKEEYKMALYNLYPGVFETVEMLPSKAGIWRVECLIGEHLHAGMSTLFLVYSNKCQTPLGMASGHIRDFQITASGQYGQWAPKLARLHYSGSINAWSTKEPFSWIKVDLLAPMIIHGIKTQGARQKFSSLYISQFIIMYSLDGKKWQTYRGNSTGTLMVFFGNVDSSGIKHNIFNPPIIARYIRLHPTHYSIRSTLRMELMGCDLNSCSMPLGMESKAISDAQITASSYFTNMFATWSPSKARLHLQGRSNAWRPQVNNPKEWLQVDFQKTMKVTGVTTQGVKSLLTSMYVKEFLISSSQDGHQWTLFFQNGKVKVFQGNQDSFTPVVNSLDPPLLTRYLRIHPQSWVHQIALRMEVLGCEAQDLY

SEQ ID NO: 878 - protein, 2303 aa, Artificial Sequence; identical to SEQ ID NO: 866
  Description of Artificial Sequence: Synthetic polypeptide

SEQ ID NO: 879 - protein, 2303 aa, Artificial Sequence; identical to SEQ ID NO: 867
  Description of Artificial Sequence: Synthetic polypeptide

SEQ ID NO: 880 - protein, 2015 aa, Artificial Sequence
  Description of Artificial Sequence: Synthetic polypeptide
ATRRYYLGAVELSWDYMQSDLGELPVDARFPPRVPKSFPFNTSVVYKKTLFVEFTVHLFNIAKPRPPWMGLLGPTIQAEVYDTVVITLKNMASHPVSLHAVGVSYWKASEGAEYDDQTSQREKEDDKVFPGGSHTYVWQVLKENGPMASDPLCLTYSYLSHVDLVKDLNSGLIGALLVCREGSLAKEKTQTLHKFILLFAVFDEGKSWHSETKNSLMQDRDAASARAWPKMHTVNGYVNRSLPGLIGCHRKSVYWHVIGMGTTPEVHSIFLEGHTFLVRNHRQASLEISPITFLTAQTLLMDLGQFLLFCHISSHQHDGMEAYVKVDSCPEEPQLRMKNNEEAEDYDDDLTDSEMDVVRFDDDNSPSFIQIRSVAKKHPKTWVHYIAAEEEDWDYAPLVLAPDDRSYKSQYLNNGPQRIGRKYKKVRFMAYTDETFKTREAIQHESGILGPLLYGEVGDTLLIIFKNQASRPYNIYPHGITDVRPLYSRRLPKGVKHLKDFPILPGEIFKYKWTVTVEDGPTKSDPRCLTRYYSSFVNMERDLASGLIGPLLICYKESVDQRGNQIMSDKRNVILFSVFDENRSWYLTENIQRFLPNPAGVQLEDPEFQASNIMHSINGYVFDSLQLSVCLHEVAYWYILSIGAQTDFLSVFFSGYTFKHKMVYEDTLTLFPFSGETVFMSMENPGLWILGCHNSDFRNRGMTALLKVSSCDKNTGDYYEDSYEDISAYLLSKNNAIEPRSFSQNPPVLKRHQGEITRTTLQSDQEEIDYDDTISVEMKKEDFDIYDEDENQSPRSFQKKTRHYFIAAVERLWDYGMSSSPHVLRNRAQSGSVPQFKKVVFQEFTDGSFTQPLYRGELNEHLGLLGPYIRAEVEDNIMVTFRNQASRPYSFYSSLISYEEDQRQGAEPRKNFVKPNETKTYFWKVQHHMAPTKDEFDCKAWAYFSDVDLEKDVHSGLIGPLLVCHTNTLNPAHGRQVTVQEFALFFTIFDETKSWYFTENMERNCRAPCNIQMEDPTFKENYRFHAINGYIMDTLPGLVMAQDQRIRWYLLSMGSNENIHSIHFSGHVFTVRKKEEYKMALYNLYPGVFETVEMLPSKAGIWRVECLIGEHLHAGMSTLFLVYSNKCQTPLGMASGHIRDFQITASGQYGQWAPKLARLHYSGSINAWSTKEPFSWIKVDLLAPMIIHGIKTQGARQKFSSLYISQFIIMYSLDGKKWQTYRGNSTGTLMVFFGNVDSSGIKHNIFNPPIIARYIRLHPTHYSIRSTLRMELMGCDLNSCSMPLGMESKAISDAQITASSYFTNMFATWSPSKARLHLQGRSNAWRPQVNNPKEWLQVDFQKTMKVTGVTTQGVKSLLTSMYVKEFLISSSQDGHQWTLFFQNGKVKVFQGNQDSFTPVVNSLDPPLLTRYLRIHPQSWVHQIALRMEVLGCEAQDLYGGSPAGSPTSTEEGTSESATPESGPGTSTEPSEGSAPGSPAGSPTSTEEGTSTEPSEGSAPGTSTEPSEGSAPGTSESATPESGPGSEPATSGSETPGSEPATSGSETPGSPAGSPTSTEEGTSESATPESGPGTSTEPSEGSAPGTSTEPSEGSAPGSPAGSPTSTEEGTSTEPSEGSAPGTSTEPSEGSAPGTSESATPESGPGTSTEPSEGSAPGTSESATPESGPGSEPATSGSETPGTSTEPSEGSAPGTSTEPSEGSAPGTSESATPESGPGTSESATPESGPGSPAGSPTSTEEGTSESATPESGPGSEPATSGSETPGTSESATPESGPGTSTEPSEGSAPGTSTEPSEGSAPGTSTEPSEGSAPGTSTEPSEGSAPGTSTEPSEGSAPGTSTEPSEGSAPGSPAGSPTSTEEGTSTEPSEGSAPGTSESATPESGPGSEPATSGSETPGTSESATPESGPGSEPATSGSETPGTSESATPESGPGTSTEPSEGSAPGTSESATPESGPGSPAGSPTSTEEGSPAGSPTSTEEGSPAGSPTSTEEGTSESATPESGPGTSTEPSEGSAP

SEQ ID NO: 881 - protein, 2256 aa, Artificial Sequence
  Description of Artificial Sequence: Synthetic polypeptide
ATRRYYLGAVELSWDYMQSDLGELPVDARFPPRVPKSFPFNTSVVYKKTLFVEFTVHLFNIAKPRPPWMGLLGPTIQAEVYDTVVITLKNMASHPVSLHAVGVSYWKASEGAEYDDQTSQREKEDDKVFPGGSHTYVWQVLKENGPMASDPLCLTYSYLSHVDLVKDLNSGLIGALLVCREGSLAKEKTQTLHKFILLFAVFDEGKSWHSETKNSLMQDRDAASARAWPKMHTVNGYVNRSLPGLIGCHRKSVYWHVIGMGTTPEVHSIFLEGHTFLVRNHRQASLEISPITFLTAQTLLMDLGQFLLFCHISSHQHDGMEAYVKVDSCPEEPQLRMKNNEEAEDYDDDLTDSEMDVVRFDDDNSPSFIQIRSVAKKHPKTWVHYIAAEEEDWDYAPLVLAPDDRSYKSQYLNNGPQRIGRKYKKVRFMAYTDETFKTREAIQHESGILGPLLYGEVGDTLLIIFKNQASRPYNIYPHGITDVRPLYSRRLPKGVKHLKDFPILPGEIFKYKWTVTVEDGPTKSDPRCLTRYYSSFVNMERDLASGLIGPLLICYKESVDQRGNQIMSDKRNVILFSVFDENRSWYLTENIQRFLPNPAGVQLEDPEFQASNIMHSINGYVFDSLQLSVCLHEVAYWYILSIGAQTDFLSVFFSGYTFKHKMVYEDTLTLFPFSGETVFMSMENPGLWILGCHNSDFRNRGMTALLKVSSCDKNTGDYYEDSYEDISAYLLSKNNAIEPRSFSQQSPRSFQKKTRHYFIAAVERLWDYGMSSSPHVLRNRAQSGSVPQFKKVVFQEFTDGSFTQPLYRGELNEHLGLLGPYIRAEVEDNIMVTFRNQASRPYSFYSSLISYEEDQRQGAEPRKNFVKPNETKTYFWKVQHHMAPTKDEFDCKAWAYFSDVDLEKDVHSGLIGPLLVCHTNTLNPAHGRQVTVQEFALFFTIFDETKSWYFTENMERNCRAPCNIQMEDPTFKENYRFHAINGYIMDTLPGLVMAQDQRIRWYLLSMGSNENIHSIHFSGHVFTVRKKEEYKMALYNLYPGVFETVEMLPSKAGIWRVECLIGEHLHAGMSTLFLVYSNKCQTPLGMASGHIRDFQITASGQYGQWAPKLARLHYSGSINAWSTKEPFSWIKVDLLAPMIIHGIKTQGARQKFSSLYISQFIIMYSLDGKKWQTYRGNSTGTLMVFFGNVDSSGIKHNIFNPPIIARYIRLHPTHYSIRSTLRMELMGCDLNSCSMPLGMESKAISDAQITASSYFTNMFATWSPSKARLHLQGRSNAWRPQVNNPKEWLQVDFQKTMKVTGVTTQGVKSLLTSMYVKEFLISSSQDGHQWTLFFQNGKVKVFQGNQDSFTPVVNSLDPPLLTRYLRIHPQSWVHQIALRMEVLGCEAQDLYGGSPAGSPTSTEEGTSESATPESGPGTSTEPSEGSAPGSPAGSPTSTEEGTSTEPSEGSAPGTSTEPSEGSAPGTSESATPESGPGSEPATSGSETPGSEPATSGSETPGSPAGSPTSTEEGTSESATPESGPGTSTEPSEGSAPGTSTEPSEGSAPGSPAGSPTSTEEGTSTEPSEGSAPGTSTEPSEGSAPGTSESATPESGPGTSTEPSEGSAPGTSESATPESGPGSEPATSGSETPGTSTEPSEGSAPGTSTEPSEGSAPGTSESATPESGPGTSESATPESGPGSPAGSPTSTEEGTSESATPESGPGSEPATSGSETPGTSESATPESGPGTSTEPSEGSAPGTSTEPSEGSAPGTSTEPSEGSAPGTSTEPSEGSAPGTSTEPSEGSAPGTSTEPSEGSAPGSPAGSPTSTEEGTSTEPSEGSAPGTSESATPESGPGSEPATSGSETPGTSESATPESGPGSEPATSGSETPGTSESATPESGPGTSTEPSEGSAPGTSESATPESGPGSPAGSPTSTEEGSPAGSPTSTEEGSPAGSPTSTEEGTSESATPESGPGTSTEPSEGSAPGTSESATPESGPGSEPATSGSETPGTSESATPESGPGSEPATSGSETPGTSESATPESGPGTSTEPSEGSAPGSPAGSPTSTEEGTSESATPESGPGSEPATSGSETPGTSESATPESGPGSPAGSPTSTEEGSPAGSPTSTEEGTSTEPSEGSAPGTSESATPESGPGTSESATPESGPGTSESATPESGPGSEPATSGSETPGSEPATSGSETPGSPAGSPTSTEEGTSTEPSEGSAPGTSTEPSEGSAPGSEPATSGSETPGTSESATPESGPGTSTEPSEGSAP

SEQ ID NO: 882 - protein, 2352 aa, Artificial Sequence
  Description of Artificial Sequence: Synthetic polypeptide
MAEPAGSPTSTEEGTPGSGTASSSPGSSTPSGATGSPGASPGTSSTGSPGSPAGSPTSTEEGTSESATPESGPGTSTEPSEGSAPGSPAGSPTSTEEGTSTEPSEGSAPGTSTEPSEGSAPGTSESATPESGPGSEPATSGSETPGSEPATSGSETPGSPAGSPTSTEEGTSESATPESGPGTSTEPSEGSAPGTSTEPSEGSAPGSPAGSPTSTEEGTSTEPSEGSAPGTSTEPSEGSAPGTSESATPESGPGTSTEPSEGSAPGTSESATPESGPGSEPATSGSETPGTSTEPSEGSAPGTSTEPSEGSAPGTSESATPESGPGTSESATPESGPGSPAGSPTSTEEGTSESATPESGPGSEPATSGSETPGTSESATPESGPGTSTEPSEGSAPGTSTEPSEGSAPGTSTEPSEGSAPGTSTEPSEGSAPGTSTEPSEGSAPGTSTEPSEGSAPGSPAGSPTSTEEGTSTEPSEGSAPGTSESATPESGPGSEPATSGSETPGTSESATPESGPGSEPATSGSETPGTSESATPESGPGTSTEPSEGSAPGTSESATPESGPGSPAGSPTSTEEGSPAGSPTSTEEGSPAGSPTSTEEGTSESATPESGPGTSTEPSEGSAPGTSESATPESGPGSEPATSGSETPGTSESATPESGPGSEPATSGSETPGTSESATPESGPGTSTEPSEGSAPGSPAGSPTSTEEGTSESATPESGPGSEPATSGSETPGTSESATPESGPGSPAGSPTSTEEGSPAGSPTSTEEGTSTEPSEGSAPGTSESATPESGPGTSESATPESGPGTSESATPESGPGSEPATSGSETPGSEPATSGSETPGSPAGSPTSTEEGTSTEPSEGSAPGTSTEPSEGSAPGSEPATSGSETPGTSESATPESGPGTSTEPSEGSAPGATRRYYLGAVELSWDYMQSDLGELPVDARFPPRVPKSFPFNTSVVYKKTLFVEFTDHLFNIAKPRPPWMGLLGPTIQAEVYDTVVITLKNMASHPVSLHAVGVSYWKASEGAEYDDQTSQREKEDDKVFPGGSHTYVWQVLKENGPMASDPLCLTYSYLSHVDLVKDLNSGLIGALLVCREGSLAKEKTQTLHKFILLFAVFDEGKSWHSETKNSLMQDRDAASARAWPKMHTVNGYVNRSLPGLIGCHRKSVYWHVIGMGTTPEVHSIFLEGHTFLVRNHRQASLEISPITFLTAQTLLMDLGQFLLFCHISSHQHDGMEAYVKVDSCPEEPQLRMKNNEEAEDYDDDLTDSEMDVVRFDDDNSPSFIQIRSVAKKHPKTWVHYIAAEEEDWDYAPLVLAPDDRSYKSQYLNNGPQRIGRKYKKVRFMAYTDETFKTREAIQHESGILGPLLYGEVGDTLLIIFKNQASRPYNIYPHGITDVRPLYSRRLPKGVKHLKDFPILPGEIFKYKWTVTVEDGPTKSDPRCLTRYYSSFVNMERDLASGLIGPLLICYKESVDQRGNQIMSDKRNVILFSVFDENRSWYLTENIQRFLPNPAGVQLEDPEFQASNIMHSINGYVFDSLQLSVCLHEVAYWYILSIGAQTDFLSVFFSGYTFKHKMVYEDTLTLFPFSGETVFMSMENPGLWILGCHNSDFRNRGMTALLKVSSCDKNTGDYYEDSYEDISAYLLSKNNAIEPRSFSQNPPVLKRHQREITRTTLQSDQEEIDYDDTISVEMKKEDFDIYDEDENQSPRSFQKKTRHYFIAAVERLWDYGMSSSPHVLRNRAQSGSVPQFKKVVFQEFTDGSFTQPLYRGELNEHLGLLGPYIRAEVEDNIMVTFRNQASRPYSFYSSLISYEEDQRQGAEPRKNFVKPNETKTYFWKVQHHMAPTKDEFDCKAWAYFSDVDLEKDVHSGLIGPLLVCHTNTLNPAHGRQVTVQEFALFFTIFDETKSWYFTENMERNCRAPCNIQMEDPTFKENYRFHAINGYIMDTLPGLVMAQDQRIRWYLLSMGSNENIHSIHFSGHVFTVRKKEEYKMALYNLYPGVFETVEMLPSKAGIWRVECLIGEHLHAGMSTLFLVYSNKCQTPLGMASGHIRDFQITASGQYGQWAPKLARLHYSGSINAWSTKEPFSWIKVDLLAPMIIHGIKTQGARQKFSSLYISQFIIMYSLDGKKWQTYRGNSTGTLMVFFGNVDSSGIKHNIFNPPIIARYIRLHPTHYSIRSTLRMELMGCDLNSCSMPLGMESKAISDAQITASSYFTNMFATWSPSKARLHLQGRSNAWRPQVNNPKEWLQVDFQKTMKVTGVTTQGVKSLLTSMYVKEFLISSSQDGHQWTLFFQNGKVKVFQGNQDSFTPVVNSLDPPLLTRYLRIHPQSWVHQIALRMEVLGCEAQDLY

SEQ ID NO: 883 - protein, 1727 aa, Artificial Sequence
  Description of Artificial Sequence: Synthetic polypeptide
ATRRYYLGAVELSWDYMQSDLGELPVDARFPPRVPKSFPFNTSVVYKKTLFVEFTDHLFNIAKPRPPWMGLLGPTIQAEVYDTVVITLKNMASHPVSLHAVGVSYWKASEGAEYDDQTSQREKEDDKVFPGGSHTYVWQVLKENGPMASDPLCLTYSYLSHVDLVKDLNSGLIGALLVCREGSLAKEKTQTLHKFILLFAVFDEGKSWHSETKNSLMQDRDAASARAWPKMHTVNGYVNRSLPGLIGCHRKSVYWHVIGMGTTPEVHSIFLEGHTFLVRNHRQASLEISPITFLTAQTLLMDLGQFLLFCHISSHQHDGMEAYVKVDSCPEEPQLRMKNNEEAEDYDDDLTDSEMDVVRFDDDNSPSFIQIRSVAKKHPKTWVHYIAAEEEDWDYAPLVLAPDDRSYKSQYLNNGPQRIGRKYKKVRFMAYTDETFKTREAIQHESGILGPLLYGEVGDTLLIIFKNQASRPYNIYPHGITDVRPLYSRRLPKGVKHLKDFPILPGEIFKYKWTVTVEDGPTKSDPRCLTRYYSSFVNMERDLASGLIGPLLICYKESVDQRGNQIMSDKRNVILFSVFDENRSWYLTENIQRFLPNPAGVQLEDPEFQASNIMHSINGYVFDSLQLSVCLHEVAYWYILSIGAQTDFLSVFFSGYTFKHKMVYEDTLTLFPFSGETVFMSMENPGLWILGCHNSDFRNRGMTALLKVSSCDKNTGDYYEDSYEDISAYLLSKNNAIEPRSFSQNPPVLKRHQREITRTTLQSDQEEIDYDDTISVEMKKEDFDIYDEDENQSPRSFQKKTRHYFIAAVERLWDYGMSSSPHVLRNRAQSGSVPQFKKVVFQEFTDGSFTQPLYRGELNEHLGLLGPYIRAEVEDNIMVTFRNQASRPYSFYSSLISYEEDQRQGAEPRKNFVKPNETKTYFWKVQHHMAPTKDEFDCKAWAYFSDVDLEKDVHSGLIGPLLVCHTNTLNPAHGRQVTVQEFALFFTIFDETKSWYFTENMERNCRAPCNIQMEDPTFKENYRFHAINGYIMDTLPGLVMAQDQRIRWYLLSMGSNENIHSIHFSGHVFTVRKKEEYKMALYNLYPGVFETVEMLPSKAGIWRVECLIGEHLHAGMSTLFLVYSNKCQTPLGMASGHIRDFQITASGQYGQWAPKLARLHYSGSINAWSTKEPFSWIKVDLLAPMIIHGIKTQGARQKFSSLYISQFIIMYSLDGKKWQTYRGNSTGTLMVFFGNVDSSGIKHNIFNPPIIARYIRLHPTHYSIRSTLRMELMGCDLNSCSMPLGMESKAISDAQITASSYFTNMFATWSPSKARLHLQGRSNAWRPQVNNPKEWLQVDFQKTMKVTGVTTQGVKSLLTSMYVKEFLISSSQDGHQWTLFFQNGKVKVFQGNQDSFTPVVNSLDPPLLTRYLRIHPQSWVHQIALRMEVLGCEAQDLYGGTSESATPESGPGSEPATSGSETPGTSESATPESGPGSEPATSGSETPGTSESATPESGPGTSTEPSEGSAPGSPAGSPTSTEEGTSESATPESGPGSEPATSGSETPGTSESATPESGPGSPAGSPTSTEEGSPAGSPTSTEEGTSTEPSEGSAPGTSESATPESGPGTSESATPESGPGTSESATPESGPGSEPATSGSETPGSEPATSGSETPGSPAGSPTSTEEGTSTEPSEGSAPGTSTEPSEGSAPGSEPATSGSETPGTSESATPESGPGTSTEPSEGSAP

SEQ ID NO: 884 - protein, 2303 aa, Artificial Sequence
  Description of Artificial Sequence: Synthetic polypeptide
ATRRYYLGAVELSWDYMQSDLGELPVDARFPPRVPKSFPFNTSVVYKKTLFVEFTDHLFNIAKPRPPWMGLLGPTIQAEVYDTVVITLKNMASHPVSLHAVGVSYWKASEGAEYDDQTSQREKEDDKVFPGGSHTYVWQVLKENGPMASDPLCLTYSYLSHVDLVKDLNSGLIGALLVCREGSLAKEKTQTLHKFILLFAVFDEGKSWHSETKNSLMQDRDAASARAWPKMHTVNGYVNRSLPGLIGCHRKSVYWHVIGMGTTPEVHSIFLEGHTFLVRNHRQASLEISPITFLTAQTLLMDLGQFLLFCHISSHQHDGMEAYVKVDSCPEEPQLRMKNNEEAEDYDDDLTDSEMDVVRFDDDNSPSFIQIRSVAKKHPKTWVHYIAAEEEDWDYAPLVLAPDDRSYKSQYLNNGPQRIGRKYKKVRFMAYTDETFKTREAIQHESGILGPLLYGEVGDTLLIIFKNQASRPYNIYPHGITDVRPLYSRRLPKGVKHLKDFPILPGEIFKYKWTVTVEDGPTKSDPRCLTRYYSSFVNMERDLASGLIGPLLICYKESVDQRGNQIMSDKRNVILFSVFDENRSWYLTENIQRFLPNPAGVQLEDPEFQASNIMHSINGYVFDSLQLSVCLHEVAYWYILSIGAQTDFLSVFFSGYTFKHKMVYEDTLTLFPFSGETVFMSMENPGLWILGCHNSDFRNRGMTALLKVSSCDKNTGDYYEDSYEDISAYLLSKNNAIEPRSFSQNPPVLKRHQREITRTTLQSDQEEIDYDDTISVEMKKEDFDIYDEDENQSPRSFQKKTRHYFIAAVERLWDYGMSSSPHVLRNRAQSGSVPQFKKVVFQEFTDGSFTQPLYRGELNEHLGLLGPYIRAEVEDNIMVTFRNQASRPYSFYSSLISYEEDQRQGAEPRKNFVKPNETKTYFWKVQHHMAPTKDEFDCKAWAYFSDVDLEKDVHSGLIGPLLVCHTNTLNPAHGRQVTVQEFALFFTIFDETKSWYFTENMERNCRAPCNIQMEDPTFKENYRFHAINGYIMDTLPGLVMAQDQRIRWYLLSMGSNENIHSIHFSGHVFTVRKKEEYKMALYNLYPGVFETVEMLPSKAGIWRVECLIGEHLHAGMSTLFLVYSNKCQTPLGMASGHIRDFQITASGQYGQWAPKLARLHYSGSINAWSTKEPFSWIKVDLLAPMIIHGIKTQGARQKFSSLYISQFIIMYSLDGKKWQTYRGNSTGTLMVFFGNVDSSGIKHNIFNPPIIARYIRLHPTHYSIRSTLRMELMGCDLNSCSMPLGMESKAISDAQITASSYFTNMFATWSPSKARLHLQGRSNAWRPQVNNPKEWLQVDFQKTMKVTGVTTQGVKSLLTSMYVKEFLISSSQDGHQWTLFFQNGKVKVFQGNQDSFTPVVNSLDPPLLTRYLRIHPQSWVHQIALRMEVLGCEAQDLYGGSPAGSPTSTEEGTSESATPESGPGTSTEPSEGSAPGSPAGSPTSTEEGTSTEPSEGSAPGTSTEPSEGSAPGTSESATPESGPGSEPATSGSETPGSEPATSGSETPGSPAGSPTSTEEGTSESATPESGPGTSTEPSEGSAPGTSTEPSEGSAPGSPAGSPTSTEEGTSTEPSEGSAPGTSTEPSEGSAPGTSESATPESGPGTSTEPSEGSAPGTSESATPESGPGSEPATSGSETPGTSTEPSEGSAPGTSTEPSEGSAPGTSESATPESGPGTSESATPESGPGSPAGSPTSTEEGTSESATPESGPGSEPATSGSETPGTSESATPESGPGTSTEPSEGSAPGTSTEPSEGSAPGTSTEPSEGSAPGTSTEPSEGSAPGTSTEPSEGSAPGTSTEPSEGSAPGSPAGSPTSTEEGTSTEPSEGSAPGTSESATPESGPGSEPATSGSETPGTSESATPESGPGSEPATSGSETPGTSESATPESGPGTSTEPSEGSAPGTSESATPESGPGSPAGSPTSTEEGSPAGSPTSTEEGSPAGSPTSTEEGTSESATPESGPGTSTEPSEGSAPGTSESATPESGPGSEPATSGSETPGTSESATPESGPGSEPATSGSETPGTSESATPESGPGTSTEPSEGSAPGSPAGSPTSTEEGTSESATPESGPGSEPATSGSETPGTSESATPESGPGSPAGSPTSTEEGSPAGSPTSTEEGTSTEPSEGSAPGTSESATPESGPGTSESATPESGPGTSESATPESGPGSEPATSGSETPGSEPATSGSETPGSPAGSPTSTEEGTSTEPSEGSAPGTSTEPSEGSAPGSEPATSGSETPGTSESATPESGPGTSTEPSEGSAP

SEQ ID NO: 885 - protein, 1727 aa, Artificial Sequence
  Description of Artificial Sequence: Synthetic polypeptide
ATRRYYLGAVELSWDYMQSDLGELPVDARFPPRVPKSFPFNTSVVYKKTLFVEFTDHLFNIAKPRPPWMGLLGPTIQAEVYDTVVITLKNMASHPVSLHAVGVSYWKASEGAEYDDQTSQREKEDDKVFPGGSHTYVWQVLKENGPMASDPLCLTYSYLSHVDLVKDLNSGLIGALLVCREGSLAKEKTQTLHKFILLFAVFDEGKSWHSETKNSLMQDRDAASARAWPKMHTVNGYVNRSLPGLIGCHRKSVYWHVIGMGTTPEVHSIFLEGHTFLVRNHRQASLEISPITFLTAQTLLMDLGQFLLFCHISSHQHDGMEAYVKVDSCPEEPQLRMKNNEEAEDYDDDLTDSEMDVVRFDDDNSPSFIQIRSVAKKHPKTWVHYIAAEEEDWDYAPLVLAPDDRSYKSQYLNNGPQRIGRKYKKVRFMAYTDETFKTREAIQHESGILGPLLYGEVGDTLLIIFKNQASRPYNIYPHGITDVRPLYSRRLPKGVKHLKDFPILPGEIFKYKWTVTVEDGPTKSDPRCLTRYYSSFVNMERDLASGLIGPLLICYKESVDQRGNQIMSDKRNVILFSVFDENRSWYLTENIQRFLPNPAGVQLEDPEFQASNIMHSINGYVFDSLQLSVCLHEVAYWYILSIGAQTDFLSVFFSGYTFKHKMVYEDTLTLFPFSGETVFMSMENPGLWILGCHNSDFRNRGMTALLKVSSCDKNTGDYYEDSYEDISAYLLSKNNAIEPRSFSQNPPVLKRHQREITRTTLQSDQEEIDYDDTISVEMKKEDFDIYDEDENQSPRSFQKKTRHYFIAAVERLWDYGMSSSPHVLRNRAQSGSVPQFKKVVFQEFTDGSFTQPLYRGELNEHLGLLGPYIRAEVEDNIMVTFRNQASRPYSFYSSLISYEEDQRQGAEPRKNFVKPNETKTYFWKVQHHMAPTKDEFDCKAWAYFSDVDLEKDVHSGLIGPLLVCHTNTLNPAHGRQVTVQEFALFFTIFDETKSWYFTENMERNCRAPCNIQMEDPTFKENYRFHAINGYIMDTLPGLVMAQDQRIRWYLLSMGSNENIHSIHFSGHVFTVRKKEEYKMALYNLYPGVFETVEMLPSKAGIWRVECLIGEHLHAGMSTLFLVYSNKCQTPLGMASGHIRDFQITASGQYGQWAPKLARLHYSGSINAWSTKEPFSWIKVDLLAPMIIHGIKTQGARQKFSSLYISQFIIMYSLDGKKWQTYRGNSTGTLMVFFGNVDSSGIKHNIFNPPIIARYIRLHPTHYSIRSTLRMELMGCDLNSCSMPLGMESKAISDAQITASSYFTNMFATWSPSKARLHLQGRSNAWRPQVNNPKEWLQVDFQKTMKVTGVTTQGVKSLLTSMYVKEFLISSSQDGHQWTLFFQNGKVKVFQGNQDSFTPVVNSLDPPLLTRYLRIHPQSWVHQIALRMEVLGCEAQDLYGGSSPSASTGTGPGSSPSASTGTGPGTPGSGTASSSPGSSTPSGATGSPGSSPSASTGTGPGASPGTSSTGSPGTPGSGTASSSPGSSTPSGATGSPGTPGSGTASSSPGASPGTSSTGSPGASPGTSSTGSPGTPGSGTASSSPGSSTPSGATGSPGASPGTSSTGSPGTPGSGTASSSPGSSTPSGATGSPGSSPSASTGTGPGSSPSASTGTGPGSSTPSGATGSPGSSTPSGATGSPGASPGTSSTGSPGASPGTSSTGSPGASPGTSSTGSPGTPGSGTASSSP

SEQ ID NO: 886 - protein, 1736 aa, Artificial Sequence
  Description of Artificial Sequence: Synthetic polypeptide
ATRRYYLGAVELSWDYMQSDLGELPVDARFPPRVPKSFPFNTSVVYKKTLFVEFTDHLFNIAKPRPPWMGLLGPTIQAEVYDTVVITLKNMASHPVSLHAVGVSYWKASEGAEYDDQTSQREKEDDKVFPGGSHTYVWQVLKENGPMASDPLCLTYSYLSHVDLVKDLNSGLIGALLVCREGSLAKEKTQTLHKFILLFAVFDEGKSWHSETKNSLMQDRDAASARAWPKMHTVNGYVNRSLPGLIGCHRKSVYWHVIGMGTTPEVHSIFLEGHTFLVRNHRQASLEISPITFLTAQTLLMDLGQFLLFCHISSHQHDGMEAYVKVDSCPEEPQLRMKNNEEAEDYDDDLTDSEMDVVRFDDDNSPSFIQIRSVAKKHPKTWVHYIAAEEEDWDYAPLVLAPDDRSYKSQYLNNGPQRIGRKYKKVRFMAYTDETFKTREAIQHESGILGPLLYGEVGDTLLIIFKNQASRPYNIYPHGITDVRPLYSRRLPKGVKHLKDFPILPGEIFKYKWTVTVEDGPTKSDPRCLTRYYSSFVNMERDLASGLIGPLLICYKESVDQRGNQIMSDKRNVILFSVFDENRSWYLTENIQRFLPNPAGVQLEDPEFQASNIMHSINGYVFDSLQLSVCLHEVAYWYILSIGAQTDFLSVFFSGYTFKHKMVYEDTLTLFPFSGETVFMSMENPGLWILGCHNSDFRNRGMTALLKVSSCDKNTGDYYEDSYEDISAYLLSKNNAIEPRSFSQNPPVLKRHQREITRTTLQSDQEEIDYDDTISVEMKKEDFDIYDEDENQSPRSFQKKTRHYFIAAVERLWDYGMSSSPHVLRNRAQSGSVPQFKKVVFQEFTDGSFTQPLYRGELNEHLGLLGPYIRAEVEDNIMVTFRNQASRPYSFYSSLISYEEDQRQGAEPRKNFVKPNETKTYFWKVQHHMAPTKDEFDCKAWAYFSDVDLEKDVHSGLIGPLLVCHTNTLNPAHGRQVTVQEFALFFTIFDETKSWYFTENMERNCRAPCNIQMEDPTFKENYRFHAINGYIMDTLPGLVMAQDQRIRWYLLSMGSNENIHSIHFSGHVFTVRKKEEYKMALYNLYPGVFETVEMLPSKAGIWRVECLIGEHLHAGMSTLFLVYSNKCQTPLGMASGHIRDFQITASGQYGQWAPKLARLHYSGSINAWSTKEPFSWIKVDLLAPMIIHGIKTQGARQKFSSLYISQFIIMYSLDGKKWQTYRGNSTGTLMVFFGNVDSSGIKHNIFNPPIIARYIRLHPTHYSIRSTLRMELMGCDLNSCSMPLGMESKAISDAQITASSYFTNMFATWSPSKARLHLQGRSNAWRPQVNNPKEWLQVDFQKTMKVTGVTTQGVKSLLTSMYVKEFLISSSQDGHQWTLFFQNGKVKVFQGNQDSFTPVVNSLDPPLLTRYLRIHPQSWVHQIALRMEVLGCEAQDLYGAGSPGAETAPGASPGTSSTGSPGASPGTSSTGSPGTPGSGTASSSPGSSTPSGATGSPGTPGSGTASSSPGSSTPSGATGSPGTPGSGTASSSPGSSTPSGATGSPGSSTPSGATGSPGSSPSASTGTGPGSSPSASTGTGPGASPGTSSTGSPGTPGSGTASSSPGSSTPSGATGSPGSSPSASTGTGPGSSPSASTGTGPGASPGTSSTGSPGASPGTSSTGSPGSSTPSGATGSPGSSPSASTGTGPGASPGTSSTGSPGSSPSASTGTGPGTPGSGTASSSPGSSTPSGATGS

SEQ ID NO: 887 - protein, 1727 aa, Artificial Sequence; identical to SEQ ID NO: 885
  Description of Artificial Sequence: Synthetic polypeptide

SEQ ID NO: 888 - protein, 1736 aa, Artificial Sequence
  Description of Artificial Sequence: Synthetic polypeptide
ATRRYYLGAVELSWDYMQSDLGELPVDARFPPRVPKSFPFNTSVVYKKTLFVEFTDHLFNIAKPRPPWMGLLGPTIQAEVYDTVVITLKNMASHPVSLHAVGVSYWKASEGAEYDDQTSQREKEDDKVFPGGSHTYVWQVLKENGPMASDPLCLTYSYLSHVDLVKDLNSGLIGALLVCREGSLAKEKTQTLHKFILLFAVFDEGKSWHSETKNSLMQDRDAASARAWPKMHTVNGYVNRSLPGLIGCHRKSVYWHVIGMGTTPEVHSIFLEGHTFLVRNHRQASLEISPITFLTAQTLLMDLGQFLLFCHISSHQHDGMEAYVKVDSCPEEPQLRMKNNEEAEDYDDDLTDSEMDVVRFDDDNSPSFIQIRSVAKKHPKTWVHYIAAEEEDWDYAPLVLAPDDRSYKSQYLNNGPQRIGRKYKKVRFMAYTDETFKTREAIQHESGILGPLLYGEVGDTLLIIFKNQASRPYNIYPHGITDVRPLYSRRLPKGVKHLKDFPILPGEIFKYKWTVTVEDGPTKSDPRCLTRYYSSFVNMERDLASGLIGPLLICYKESVDQRGNQIMSDKRNVILFSVFDENRSWYLTENIQRFLPNPAGVQLEDPEFQASNIMHSINGYVFDSLQLSVCLHEVAYWYILSIGAQTDFLSVFFSGYTFKHKMVYEDTLTLFPFSGETVFMSMENPGLWILGCHNSDFRNRGMTALLKVSSCDKNTGDYYEDSYEDISAYLLSKNNAIEPRSFSQNPPVLKRHQAEITRTTLQSDQEEIDYDDTISVEMKKEDFDIYDEDENQSPRSFQKKTRHYFIAAVERLWDYGMSSSPHVLRNRAQSGSVPQFKKVVFQEFTDGSFTQPLYRGELNEHLGLLGPYIRAEVEDNIMVTFRNQASRPYSFYSSLISYEEDQRQGAEPRKNFVKPNETKTYFWKVQHHMAPTKDEFDCKAWAYFSDVDLEKDVHSGLIGPLLVCHTNTLNPAHGRQVTVQEFALFFTIFDETKSWYFTENMERNCRAPCNIQMEDPTFKENYRFHAINGYIMDTLPGLVMAQDQRIRWYLLSMGSNENIHSIHFSGHVFTVRKKEEYKMALYNLYPGVFETVEMLPSKAGIWRVECLIGEHLHAGMSTLFLVYSNKCQTPLGMASGHIRDFQITASGQYGQWAPKLARLHYSGSINAWSTKEPFSWIKVDLLAPMIIHGIKTQGARQKFSSLYISQFIIMYSLDGKKWQTYRGNSTGTLMVFFGNVDSSGIKHNIFNPPIIARYIRLHPTHYSIRSTLRMELMGCDLNSCSMPLGMESKAISDAQITASSYFTNMFATWSPSKARLHLQGRSNAWRPQVNNPKEWLQVDFQKTMKVTGVTTQGVKSLLTSMYVKEFLISSSQDGHQWTLFFQNGKVKVFQGNQDSFTPVVNSLDPPLLTRYLRIHPQSWVHQIALRMEVLGCEAQDLYGAGSPGAETAPGASPGTSSTGSPGASPGTSSTGSPGTPGSGTASSSPGSSTPSGATGSPGTPGSGTASSSPGSSTPSGATGSPGTPGSGTASSSPGSSTPSGATGSPGSSTPSGATGSPGSSPSASTGTGPGSSPSASTGTGPGASPGTSSTGSPGTPGSGTASSSPGSSTPSGATGSPGSSPSASTGTGPGSSPSASTGTGPGASPGTSSTGSPGASPGTSSTGSPGSSTPSGATGSPGSSPSASTGTGPGASPGTSSTGSPGSSPSASTGTGPGTPGSGTASSSPGSSTPSGATGS

SEQ ID NO: 889 - protein, 1438 aa, Artificial Sequence
  Description of Artificial Sequence: Synthetic polypeptide
ATRRYYLGAVELSWDYMQSDLGELPVDARFPPRVPKSFPFNTSVVYKKTLFVEFTDHLFNIAKPRPPWMGLLGPTIQAEVYDTVVITLKNMASHPVSLHAVGVSYWKASEGAEYDDQTSQREKEDDKVFPGGSHTYVWQVLKENGPMASDPLCLTYSYLSHVDLVKDLNSGLIGALLVCREGSLAKEKTQTLHKFILLFAVFDEGKSWHSETKNSLMQDRDAASARAWPKMHTVNGYVNRSLPGLIGCHRKSVYWHVIGMGTTPEVHSIFLEGHTFLVRNHRQASLEISPITFLTAQTLLMDLGQFLLFCHISSHQHDGMEAYVKVDSCPEEPQLRMKNNEEAEDYDDDLTDSEMDVVRFDDDNSPSFIQIRSVAKKHPKTWVHYIAAEEEDWDYAPLVLAPDDRSYKSQYLNNGPQRIGRKYKKVRFMAYTDETFKTREAIQHESGILGPLLYGEVGDTLLIIFKNQASRPYNIYPHGITDVRPLYSRRLPKGVKHLKDFPILPGEIFKYKWTVTVEDGPTKSDPRCLTRYYSSFVNMERDLASGLIGPLLICYKESVDQRGNQIMSDKRNVILFSVFDENRSWYLTENIQRFLPNPAGVQLEDPEFQASNIMHSINGYVFDSLQLSVCLHEVAYWYILSIGAQTDFLSVFFSGYTFKHKMVYEDTLTLFPFSGETVFMSMENPGLWILGCHNSDFRNRGMTALLKVSSCDKNTGDYYEDSYEDISAYLLSKNNAIEPRSFSQNPPVLKRHQAEITRTTLQSDQEEIDYDDTISVEMKKEDFDIYDEDENQSPRSFQKKTRHYFIAAVERLWDYGMSSSPHVLRNRAQSGSVPQFKKVVFQEFTDGSFTQPLYRGELNEHLGLLGPYIRAEVEDNIMVTFRNQASRPYSFYSSLISYEEDQRQGAEPRKNFVKPNETKTYFWKVQHHMAPTKDEFDCKAWAYFSDVDLEKDVHSGLIGPLLVCHTNTLNPAHGRQVTVQEFALFFTIFDETKSWYFTENMERNCRAPCNIQMEDPTFKENYRFHAINGYIMDTLPGLVMAQDQRIRWYLLSMGSNENIHSIHFSGHVFTVRKKEEYKMALYNLYPGVFETVEMLPSKAGIWRVECLIGEHLHAGMSTLFLVYSNKCQTPLGMASGHIRDFQITASGQYGQWAPKLARLHYSGSINAWSTKEPFSWIKVDLLAPMIIHGIKTQGARQKFSSLYISQFIIMYSLDGKKWQTYRGNSTGTLMVFFGNVDSSGIKHNIFNPPIIARYIRLHPTHYSIRSTLRMELMGCDLNSCSMPLGMESKAISDAQITASSYFTNMFATWSPSKARLHLQGRSNAWRPQVNNPKEWLQVDFQKTMKVTGVTTQGVKSLLTSMYVKEFLISSSQDGHQWTLFFQNGKVKVFQGNQDSFTPVVNSLDPPLLTRYLRIHPQSWVHQIALRMEVLGCEAQDLY

SEQ ID NO: 890 - protein, 1727 aa, Artificial Sequence
  Description of Artificial Sequence: Synthetic polypeptide
ATRRYYLGAVELSWDYMQSDLGELPVDARFPPRVPKSFPFNTSVVYKKTLFVEFTDHLFNIAKPRPPWMGLLGPTIQAEVYDTVVITLKNMASHPVSLHAVGVSYWKASEGAEYDDQTSQREKEDDKVFPGGSHTYVWQVLKENGPMASDPLCLTYSYLSHVDLVKDLNSGLIGALLVCREGSLAKEKTQTLHKFILLFAVFDEGKSWHSETKNSLMQDRDAASARAWPKMHTVNGYVNRSLPGLIGCHRKSVYWHVIGMGTTPEVHSIFLEGHTFLVRNHRQASLEISPITFLTAQTLLMDLGQFLLFCHISSHQHDGMEAYVKVDSCPEEPQLRMKNNEEAEDYDDDLTDSEMDVVRFDDDNSPSFIQIRSVAKKHPKTWVHYIAAEEEDWDYAPLVLAPDDRSYKSQYLNNGPQRIGRKYKKVRFMAYTDETFKTREAIQHESGILGPLLYGEVGDTLLIIFKNQASRPYNIYPHGITDVRPLYSRRLPKGVKHLKDFPILPGEIFKYKWTVTVEDGPTKSDPRCLTRYYSSFVNMERDLASGLIGPLLICYKESVDQRGNQIMSDKRNVILFSVFDENRSWYLTENIQRFLPNPAGVQLEDPEFQASNIMHSINGYVFDSLQLSVCLHEVAYWYILSIGAQTDFLSVFFSGYTFKHKMVYEDTLTLFPFSGETVFMSMENPGLWILGCHNSDFRNRGMTALLKVSSCDKNTGDYYEDSYEDISAYLLSKNNAIEPRSFSQNPPVLKRHQAEITRTTLQSDQEEIDYDDTISVEMKKEDFDIYDEDENQSPRSFQKKTRHYFIAAVERLWDYGMSSSPHVLRNRAQSGSVPQFKKVVFQEFTDGSFTQPLYRGELNEHLGLLGPYIRAEVEDNIMVTFRNQASRPYSFYSSLISYEEDQRQGAEPRKNFVKPNETKTYFWKVQHHMAPTKDEFDCKAWAYFSDVDLEKDVHSGLIGPLLVCHTNTLNPAHGRQVTVQEFALFFTIFDETKSWYFTENMERNCRAPCNIQMEDPTFKENYRFHAINGYIMDTLPGLVMAQDQRIRWYLLSMGSNENIHSIHFSGHVFTVRKKEEYKMALYNLYPGVFETVEMLPSKAGIWRVECLIGEHLHAGMSTLFLVYSNKCQTPLGMASGHIRDFQITASGQYGQWAPKLARLHYSGSINAWSTKEPFSWIKVDLLAPMIIHGIKTQGARQKFSSLYISQFIIMYSLDGKKWQTYRGNSTGTLMVFFGNVDSSGIKHNIFNPPIIARYIRLHPTHYSIRSTLRMELMGCDLNSCSMPLGMESKAISDAQITASSYFTNMFATWSPSKARLHLQGRSNAWRPQVNNPKEWLQVDFQKTMKVTGVTTQGVKSLLTSMYVKEFLISSSQDGHQWTLFFQNGKVKVFQGNQDSFTPVVNSLDPPLLTRYLRIHPQSWVHQIALRMEVLGCEAQDLYGGTSESATPESGPGSEPATSGSETPGTSESATPESGPGSEPATSGSETPGTSESATPESGPGTSTEPSEGSAPGSPAGSPTSTEEGTSESATPESGPGSEPATSGSETPGTSESATPESGPGSPAGSPTSTEEGSPAGSPTSTEEGTSTEPSEGSAPGTSESATPESGPGTSESATPESGPGTSESATPESGPGSEPATSGSETPGSEPATSGSETPGSPAGSPTSTEEGTSTEPSEGSAPGTSTEPSEGSAPGSEPATSGSETPGTSESATPESGPGTSTEPSEGSAP

SEQ ID NO: 891 - protein, 2303 aa, Artificial Sequence
  Description of Artificial Sequence: Synthetic polypeptide
ATRRYYLGAVELSWDYMQSDLGELPVDARFPPRVPKSFPFNTSVVYKKTLFVEFTDHLFNIAKPRPPWMGLLGPTIQAEVYDTVVITLKNMASHPVSLHAVGVSYWKASEGAEYDDQTSQREKEDDKVFPGGSHTYVWQVLKENGPMASDPLCLTYSYLSHVDLVKDLNSGLIGALLVCREGSLAKEKTQTLHKFILLFAVFDEGKSWHSETKNSLMQDRDAASARAWPKMHTVNGYVNRSLPGLIGCHRKSVYWHVIGMGTTPEVHSIFLEGHTFLVRNHRQASLEISPITFLTAQTLLMDLGQFLLFCHISSHQHDGMEAYVKVDSCPEEPQLRMKNNEEAEDYDDDLTDSEMDVVRFDDDNSPSFIQIRSVAKKHPKTWVHYIAAEEEDWDYAPLVLAPDDRSYKSQYLNNGPQRIGRKYKKVRFMAYTDETFKTREAIQHESGILGPLLYGEVGDTLLIIFKNQASRPYNIYPHGITDVRPLYSRRLPKGVKHLKDFPILPGEIFKYKWTVTVEDGPTKSDPRCLTRYYSSFVNMERDLASGLIGPLLICYKESVDQRGNQIMSDKRNVILFSVFDENRSWYLTENIQRFLPNPAGVQLEDPEFQASNIMHSINGYVFDSLQLSVCLHEVAYWYILSIGAQTDFLSVFFSGYTFKHKMVYEDTLTLFPFSGETVFMSMENPGLWILGCHNSDFRNRGMTALLKVSSCDKNTGDYYEDSYEDISAYLLSKNNAIEPRSFSQNPPVLKRHQAEITRTTLQSDQEEIDYDDTISVEMKKEDFDIYDEDENQSPRSFQKKTRHYFIAAVERLWDYGMSSSPHVLRNRAQSGSVPQFKKVVFQEFTDGSFTQPLYRGELNEHLGLLGPYIRAEVEDNIMVTFRNQASRPYSFYSSLISYEEDQRQGAEPRKNFVKPNETKTYFWKVQHHMAPTKDEFDCKAWAYFSDVDLEKDVHSGLIGPLLVCHTNTLNPAHGRQVTVQEFALFFTIFDETKSWYFTENMERNCRAPCNIQMEDPTFKENYRFHAINGYIMDTLPGLVMAQDQRIRWYLLSMGSNENIHSIHFSGHVFTVRKKEEYKMALYNLYPGVFETVEMLPSKAGIWRVECLIGEHLHAGMSTLFLVYSNKCQTPLGMASGHIRDFQITASGQYGQWAPKLARLHYSGSINAWSTKEPFSWIKVDLLAPMIIHGIKTQGARQKFSSLYISQFIIMYSLDGKKWQTYRGNSTGTLMVFFGNVDSSGIKHNIFNPPIIARYIRLHPTHYSIRSTLRMELMGCDLNSCSMPLGMESKAISDAQITASSYFTNMFATWSPSKARLHLQGRSNAWRPQVNNPKEWLQVDFQKTMKVTGVTTQGVKSLLTSMYVKEFLISSSQDGHQWTLFFQNGKVKVFQGNQDSFTPVVNSLDPPLLTRYLRIHPQSWVHQIALRMEVLGCEAQDLYGGSPAGSPTSTEEGTSESATPESGPGTSTEPSEGSAPGSPAGSPTSTEEGTSTEPSEGSAPGTSTEPSEGSAPGTSESATPESGPGSEPATSGSETPGSEPATSGSETPGSPAGSPTSTEEGTSESATPESGPGTSTEPSEGSAPGTSTEPSEGSAPGSPAGSPTSTEEGTSTEPSEGSAPGTSTEPSEGSAPGTSESATPESGPGTSTEPSEGSAPGTSESATPESGPGSEPATSGSETPGTSTEPSEGSAPGTSTEPSEGSAPGTSESATPESGPGTSESATPESGPGSPAGSPTSTEEGTSESATPESGPGSEPATSGSETPGTSESATPESGPGTSTEPSEGSAPGTSTEPSEGSAPGTSTEPSEGSAPGTSTEPSEGSAPGTSTEPSEGSAPGTSTEPSEGSAPGSPAGSPTSTEEGTSTEPSEGSAPGTSESATPESGPGSEPATSGSETPGTSESATPESGPGSEPATSGSETPGTSESATPESGPGTSTEPSEGSAPGTSESATPESGPGSPAGSPTSTEEGSPAGSPTSTEEGSPAGSPTSTEEGTSESATPESGPGTSTEPSEGSAPGTSESATPESGPGSEPATSGSETPGTSESATPESGPGSEPATSGSETPGTSESATPESGPGTSTEPSEGSAPGSPAGSPTSTEEGTSESATPESGPGSEPATSGSETPGTSESATPESGPGSPAGSPTSTEEGSPAGSPTSTEEGTSTEPSEGSAPGTSESATPESGPGTSESATPESGPGTSESATPESGPGSEPATSGSETPGSEPATSGSETPGSPAGSPTSTEEGTSTEPSEGSAPGTSTEPSEGSAPGSEPATSGSETPGTSESATPESGPGTSTEPSEGSAP

SEQ ID NO: 892 - protein, 1874 aa, Artificial Sequence
  Description of Artificial Sequence: Synthetic polypeptide
ATRRYYLGAVELSWDYMQSDLGELPVDARFPPRVPKSFPFNTSVVYKKTLFVEFTVHLFNIAKPRPPWMGLLGPTIQAEVYDTVVITLKNMASHPVSLHAVGVSYWKASEGAEYDDQTSQREKEDDKGGSEPATSGSETPGTSESATPESGPGSEPATSGSETPGSPAGSPTSTEEGTSTEPSEGSAPGSEPATSGSETPGSEPATSGSETPGSEPATSGSETPGTSTEPSEGSAPGTSESATPESGPGSEPATSGSETPGTSTEPSEGSAPGVFPGGSHTYVWQVLKENGPMASDPLCLTYSYLSHVDLVKDLNSGLIGALLVCREGSLAKEKTQTLHKFILLFAVFDEGKSWHSETKNSLMQDRDAASARAWPKMHTVNGYVNRSLPGLIGCHRKSVYWHVIGMGTTPEVHSIFLEGHTFLVRNHRQASLEISPITFLTAQTLLMDLGQFLLFCHISSHQHDGMEAYVKVDSCPEEPQLRMKNNEEAEDYDDDLTDSEMDVVRFDDDNSPSFIQIRSVAKKHPKTWVHYIAAEEEDWDYAPLVLAPDDRSYKSQYLNNGPQRIGRKYKKVRFMAYTDETFKTREAIQHESGILGPLLYGEVGDTLLIIFKNQASRPYNIYPHGITDVRPLYSRRLPKGVKHLKDFPILPGEIFKYKWTVTVEDGPTKSDPRCLTRYYSSFVNMERDLASGLIGPLLICYKESVDQRGNQIMSDKRNVILFSVFDENRSWYLTENIQRFLPNPAGVQLEDPEFQASNIMHSINGYVFDSLQLSVCLHEVAYWYILSIGAQTDFLSVFFSGYTFKHKMVYEDTLTLFPFSGETVFMSMENPGLWILGCHNSDFRNRGMTALLKVSSCDKNTGDYYEDSYEDISAYLLSKNNAIEPRSFSQNGGTSESATPESGPGSEPATSGSETPGTSESATPESGPGSEPATSGSETPGTSESATPESGPGTSTEPSEGSAPGSPAGSPTSTEEGTSESATPESGPGSEPATSGSETPGTSESATPESGPGSPAGSPTSTEEGSPAGSPTSTEEGTSTEPSEGSAPGTSESATPESGPGTSESATPESGPGTSESATPESGPGSEPATSGSETPGSEPATSGSETPGSPAGSPTSTEEGTSTEPSEGSAPGTSTEPSEGSAPGSEPATSGSETPGTSESATPESGPGTSTEPSEGSAPGPPVLKRHQREITRTTLQSDQEEIDYDDTISVEMKKEDFDIYDEDENQSPRSFQKKTRHYFIAAVERLWDYGMSSSPHVLRNRAQSGSVPQFKKVVFQEFTDGSFTQPLYRGELNEHLGLLGPYIRAEVEDNIMVTFRNQASRPYSFYSSLISYEEDQRQGAEPRKNFVKPNETKTYFWKVQHHMAPTKDEFDCKAWAYFSDVDLEKDVHSGLIGPLLVCHTNTLNPAHGRQVTVQEFALFFTIFDETKSWYFTENMERNCRAPCNIQMEDPTFKENYRFHAINGYIMDTLPGLVMAQDQRIRWYLLSMGSNENIHSIHFSGHVFTVRKKEEYKMALYNLYPGVFETVEMLPSKAGIWRVECLIGEHLHAGMSTLFLVYSNKCQTPLGMASGHIRDFQITASGQYGQWAPKLARLHYSGSINAWSTKEPFSWIKVDLLAPMIIHGIKTQGARQKFSSLYISQFIIMYSLDGKKWQTYRGNSTGTLMVFFGNVDSSGIKHNIFNPPIIARYIRLHPTHYSIRSTLRMELMGCDLNSCSMPLGMESKAISDAQITASSYFTNMFATWSPSKARLHLQGRSNAWRPQVNNPKEWLQVDFQKTMKVTGVTTQGVKSLLTSMYVKEFLISSSQDGHQWTLFFQNGKVKVFQGNQDSFTPVVNSLDPPLLTRYLRIHPQSWVHQIALRMEVLGCEAQDLY

SEQ ID NO: 893 - protein, 2162 aa, Artificial Sequence
  Description of Artificial Sequence: Synthetic polypeptide
ATRRYYLGAVELSWDYMQSDLGELPVDARFPPRVPKSFPFNTSVVYKKTLFVEFTVHLFNIAKPRPPWMGLLGPTIQAEVYDTVVITLKNMASHPVSLHAVGVSYWKASEGAEYDDQTSQREKEDDKVFPGGSHTYVWQVLKENGPMASDPLCLTYSYLSHVDLVKDLNSGLIGALLVCREGSLAKEKTQTLHKFILLFAVFDEGKSWHSETKNSLMQDRDAASARAWPKMHTVNGYVNRSLPGLIGCHRKSVYWHVIGMGTTPEVHSIFLEGHTFLVRNHRQASLEISPITFLTAQTLLMDLGQFLLFCHISSHQHDGMEAYVKVDSCPEEPQLRMKNNEEAEDYDDDLTDSEMDVVRFDDDNSPSFIQIRSVAGGSPAGSPTSTEEGTSESATPESGPGTSTEPSEGSAPGSPAGSPTSTEEGTSTEPSEGSAPGTSTEPSEGSAPGTSESATPESGPGSEPATSGSETPGSEPATSGSETPGSPAGSPTSTEEGTSESATPESGPGTSTEPSEGSAPGTSTEPSEGSAPGSPAGSPTSTEEGTSTEPSEGSAPGTSTEPSEGSAPGTSESATPESGPGTSTEPSEGSAPGTSESATPESGPGSEPATSGSETPGTSTEPSEGSAPGTSTEPSEGSAPGTSESATPESGPGTSESATPESGPGSPAGSPTSTEEGTSESATPESGPGSEPATSGSETPGTSESATPESGPGTSTEPSEGSAPGTSTEPSEGSAPGTSTEPSEGSAPGTSTEPSEGSAPGTSTEPSEGSAPGTSTEPSEGSAPGSPAGSPTSTEEGTSTEPSEGSAPGTSESATPESGPGSEPATSGSETPGTSESATPESGPGSEPATSGSETPGTSESATPESGPGTSTEPSEGSAPGTSESATPESGPGSPAGSPTSTEEGSPAGSPTSTEEGSPAGSPTSTEEGTSESATPESGPGTSTEPSEGSAPGKKHPKTWVHYIAAEEEDWDYAPLVLAPDDRSYKSQYLNNGPQRIGRKYKKVRFMAYTDETFKTREAIQHESGILGPLLYGEVGDTLLIIFKNQASRPYNIYPHGITDVRPLYSRRLPKGVKHLKDFPILPGEIFKYKWTVTVEDGPTKSDPRCLTRYYSSFVNMERDLASGLIGPLLICYKESVDQRGNQIMSDKRNVILFSVFDENRSWYLTENIQRFLPNPAGVQLEDPEFQASNIMHSINGYVFDSLQLSVCLHEVAYWYILSIGAQTDFLSVFFSGYTFKHKMVYEDTLTLFPFSGETVFMSMENPGLWILGCHNSDFRNRGMTALLKVSSCDKNTGDYYEDSYEDISAYLLSKNNAIEPRSFSQNGGSEPATSGSETPGTSESATPESGPGSEPATSGSETPGSPAGSPTSTEEGTSTEPSEGSAPGSEPATSGSETPGSEPATSGSETPGSEPATSGSETPGTSTEPSEGSAPGTSESATPESGPGSEPATSGSETPGTSTEPSEGSAPGPPVLKRHQREITRTTLQSDQEEIDYDDTISVEMKKEDFDIYDEDENQSPRSFQKKTRHYFIAAVERLWDYGMSSSPHVLRNRAQSGSVPQFKKVVFQEFTDGSFTQPLYRGELNEHLGLLGPYIRAEVEDNIMVTFRNQASRPYSFYSSLISYEEDQRQGAEPRKNFVKPNETKTYFWKVQHHMAPTKDEFDCKAWAYFSDVDLEKDVHSGLIGPLLVCHTNTLNPAHGRQVTVQEFALFFTIFDETKSWYFTENMERNCRAPCNIQMEDPTFKENYRFHAINGYIMDTLPGLVMAQDQRIRWYLLSMGSNENIHSIHFSGHVFTVRKKEEYKMALYNLYPGVFETVEMLPSKAGIWRVECLIGEHLHAGMSTLFLVYSNKCQTPLGMASGHIRDFQITASGQYGQWAPKLARLHYSGSINAWSTKEPFSWIKVDLLAPMIIHGIKTQGARQKFSSLYISQFIIMYSLDGKKWQTYRGNSTGTLMVFFGNVDSSGIKHNIFNPPIIARYIRLHPTHYSIRSTLRMELMGCDLNSCSMPLGMESKAISDAQITASSYFTNMFATWSPSKARLHLQGRSNAWRPQVNNPKEWLQVDFQKTMKVTGVTTQGVKSLLTSMYVKEFLISSSQDGHQWTLFFQNGKVKVFQGNQDSFTPVVNSLDPPLLTRYLRIHPQSWVHQIALRMEVLGCEAQDLY

SEQ ID NO: 894 - protein, 2449 aa, Artificial Sequence
  Description of Artificial Sequence: Synthetic polypeptide
ATRRYYLGAVELSWDYMQSDLGELPVDARFPPRVPKSFPFNTSVVYKKTLFVEFTVHLFNIAKPRPPWMGLLGPTIQAEVYDTVVITLKNMASHPVSLHAVGVSYWKASEGAEYDDQTSQREKEDDKVFPGGSHTYVWQVLKENGPMASDPLCLTYSYLSHVDLVKDLNSGLIGALLVCREGSLAKEKTQTLHKFILLFAVFDEGKSWHSETKNSLMQDRDAASARAWPKMHTVNGYVNRSLPGLIGCHRKSVYWHVIGMGTTPEVHSIFLEGHTFLVRNHRQASLEISPITFLTAQTLLMDLGQFLLFCHISSHQHDGMEAYVKVDSCPEEPQLRMKNNEEAEDYDDDLTDSEMDVVRFDDDNSPSFIQIRSVAKKHPKTWVHYIAAEEEDWDYAPLVLAPDDRSYKSQYLNNGPQRIGRKYKKVRFMAYTDETFKTREAIQHESGILGPLLYGEVGDTLLIIFKNQASRPYNIYPHGITDVRPLYSRRLPKGVKHLKDFPILPGEIFKYKWTVTVEDGPTKSDPRCLTRYYSSFVNMERDLASGLIGPLLICYKESVDQRGNQIMSDKRNVILFSVFDENRSWYLTENIQRFLPNPAGVQLEDPEFQASNIMHSINGYVFDSLQLSVCLHEVAYWYILSIGAQTDFLSVFFSGYTFKHKMVYEDTLTLFPFSGETVFMSMENPGLWILGCHNSDFRNRGMTALLKVSSCDKNTGDYYEDSYEDISAYLLSKNNAIEPRSFSQNPPVLKRHQREITRTTLQSDQEEIDYDDTISVEMKKEDFDIYDEDENQSPRSFQKKTRHYFIAAVERLWDYGMSSSPHVLRNRAQSGSVPQFKKVVFQEFTDGSFTQPLYRGELNEHLGLLGPYIRAEVEDNIMVTFRNQASRPYSFYSSLISYGGTSTPESGSASPGTSPSGESSTAPGTSPSGESSTAPGSTSSTAESPGPGSTSESPSGTAPGSTSSTAESPGPGTSPSGESSTAPGTSTPESGSASPGSTSSTAESPGPGTSPSGESSTAPGTSPSGESSTAPGTSPSGESSTAPGEEDQRQGAEPRKNFVKPNETKTYFWKVQHHMAPTKDEFDCKAWAYFSDVDLEKDVHSGLIGPLLVCHTNTLNPAHGRQVTVQEFALFFTIFDETKSWYFTENMERNCRAPCNIQMEDPTFKENYRFHAINGYIMDTLPGLVMAQDQRIRWYLLSMGSNENIHSIHFSGHVFTVRKKEEYKMALYNLYPGVFETVEMLPSKAGIWRVECLIGEHLHAGMSTLFLVYSNKCQTPLGMASGHIRDFQITASGQYGQWAPKLARLHYSGSINAWSTKEPFSWIKVDLLAPMIIHGIKTQGARQKFSSLYISQFIIMYSLDGKKWQTYRGNSTGTLMVFFGNVDSSGIKHNIFNPPIIARYIRLHPTHYSIRSTLRMELMGCDLNSCSMPLGMESKAISDAQITASSYFTNMFATWSPSKARLHLQGRSNAWRPQVNNPKEWLQVDFQKTMKVTGVTTQGVKSLLTSMYVKEFLISSSQDGHQWTLFFQNGKVKVFQGNQDSFTPVVNSLDPPLLTRYLRIHPQSWVHQIALRMEVLGCEAQDLYGGSPAGSPTSTEEGTSESATPESGPGTSTEPSEGSAPGSPAGSPTSTEEGTSTEPSEGSAPGTSTEPSEGSAPGTSESATPESGPGSEPATSGSETPGSEPATSGSETPGSPAGSPTSTEEGTSESATPESGPGTSTEPSEGSAPGTSTEPSEGSAPGSPAGSPTSTEEGTSTEPSEGSAPGTSTEPSEGSAPGTSESATPESGPGTSTEPSEGSAPGTSESATPESGPGSEPATSGSETPGTSTEPSEGSAPGTSTEPSEGSAPGTSESATPESGPGTSESATPESGPGSPAGSPTSTEEGTSESATPESGPGSEPATSGSETPGTSESATPESGPGTSTEPSEGSAPGTSTEPSEGSAPGTSTEPSEGSAPGTSTEPSEGSAPGTSTEPSEGSAPGTSTEPSEGSAPGSPAGSPTSTEEGTSTEPSEGSAPGTSESATPESGPGSEPATSGSETPGTSESATPESGPGSEPATSGSETPGTSESATPESGPGTSTEPSEGSAPGTSESATPESGPGSPAGSPTSTEEGSPAGSPTSTEEGSPAGSPTSTEEGTSESATPESGPGTSTEPSEGSAPGTSESATPESGPGSEPATSGSETPGTSESATPESGPGSEPATSGSETPGTSESATPESGPGTSTEPSEGSAPGSPAGSPTSTEEGTSESATPESGPGSEPATSGSETPGTSESATPESGPGSPAGSPTSTEEGSPAGSPTSTEEGTSTEPSEGSAPGTSESATPESGPGTSESATPESGPGTSESATPESGPGSEPATSGSETPGSEPATSGSETPGSPAGSPTSTEEGTSTEPSEGSAPGTSTEPSEGSAPGSEPATSGSETPGTSESATPESGPGTSTEPSEGSAP

SEQ ID NO: 895 - protein, 2450 aa, Artificial Sequence [sequence omitted]

SEQ ID NO: 896 - protein, 1715 aa, Artificial Sequence
  Description of Artificial Sequence: Synthetic polypeptide
ATRRYYLGAVELSWDYMQSDLGELPVDARFPPRVPKSFPFNTSVVYKKTLFVEFTVHLFNIAKPRPPWMGLLGPTIQAEVYDTVVITLKNMASHPVSLHAVGVSYWKASEGAEYDDQTSQREKEDDKVFPGGSHTYVWQVLKENGPMASDPLCLTYSYLSHVDLVKDLNSGLIGALLVCREGSLAKEKTQTLHKFILLFAVFDEGKSWHSETKNSLMQDRDAASARAWPKMHTVNGYVNRSLPGLIGCHRKSVYWHVIGMGTTPEVHSIFLEGHTFLVRNHRQASLEISPITFLTAQTLLMDLGQFLLFCHISSHQHDGMEAYVKVDSCPEEPQLRMKNNEEAEDYDDDLTDSEMDVVRFDDDNSPSFIQIRSVAKKHPKTWVHYIAAEEEDWDYAPLVLAPDDRSYKSQYLNNGPQRIGRKYKKVRFMAYTDETFKTREAIQHESGILGPLLYGEVGDTLLIIFKNQASRPYNIYPHGITDVRPLYSRRLPKGVKHLKDFPILPGEIFKYKWTVTVEDGPTKSDPRCLTRYYSSFVNMERDLASGLIGPLLICYKESVDQRGNQIMSDKRNVILFSVFDENRSWYLTENIQRFLPNPAGVQLEDPEFQASNIMHSINGYVFDSLQLSVCLHEVAYWYILSIGAQTDFLSVFFSGYTFKHKMVYEDTLTLFPFSGETVFMSMENPGLWILGCHNSDFRNRGMTALLKVSSCDKNTGDYYEDSYEDISAYLLSKNNAIEPRSFSQNPPVLKRHQREITRTTLQSDQEEIDYDDTISVEMKKEDFDIYDEDENQSPRSFQKKTRHYFIAAVERLWDYGMSSSPHVLRNRAQSGSVPQFKKVVFQEFTDGSFTQPLYRGELNEHLGLLGPYIRAEVEDNIMVTFRNQASRPYSFYSSLISYEEDQRQGGGSEPATSGSETPGTSESATPESGPGSEPATSGSETPGSPAGSPTSTEEGTSTEPSEGSAPGSEPATSGSETPGSEPATSGSETPGSEPATSGSETPGTSTEPSEGSAPGTSESATPESGPGSEPATSGSETPGTSTEPSEGSAPGAEPRKNFVKPNETKTYFWKVQHHMAPTKDEFDCKAWAYFSDVDLEKDVHSGLIGPLLVCHTNTLNPAHGRQVTVQEFALFFTIFDETKSWYFTENMERNCRAPCNIQMEDPTFKENYRFHAINGYIMDTLPGLVMAQDQRIRWYLLSMGSNENIHSIHFSGHVFTVRKKEEYKMALYNLYPGVFETVEMLPSKAGIWRVECLIGEHLHAGMSTLFLVYSNKCQTPLGMASGHIRDFQITASGQYGQWAPKLARLHYSGSINAWSTKEPFSWIKVDLLAPMIIHGIKTQGARQKFGSEPATSGSETPGTSESATPESGPGTSTEPSEGSAPGSPAGSPGSSLYISQFIIMYSLDGKKWQTYRGNSTGTLMVFFGNVDSSGIKHNIFNPPIIARYIRLHPTHYSIRSTLRMELMGCDLNSCSMPLGMESKAISDAQITASSYFTNMFATWSPSKARLHLQGRSNAWRPQVGPAGSPTSTEEGTSTEPSEGSAPGTSESATPESGPGSEPATSGGNNPKEWLQVDFQKTMKVTGVTTQGVKSLLTSMYVKEFLISSSQDGHQWTLFFQNGGTEPSEGSAPGSPAGSPTSTEEGTSESATPESGPGSEPATSGSKVKVFQGNQDSFTPVVNSLDPPLLTRYLRIHPQSWVHQIALRMEVLGCEAQDLY

SEQ ID NO: 897 - protein, 3317 aa, Artificial Sequence
  Description of Artificial Sequence: Synthetic polypeptide
ATRRYYLGAVELSWDYMQSDLGELPVDARGPGSSPSASTGTGPGSSPSASTGTGPGTPGSGTASSSPGSSTPSGATGSPGSSPSASTGTGPGASPGTSSTGSPGTPGSGTASSSPGSSTPSGATGSPGTPGSGTASSSPGASPGTSSTGSPGASPGTSSTGSPGTPGSGTASSSGFPPRVPKSFPFNTSVVYKKTLFVEFTVHLFNIAKPRPPWMGLLGPTIQAEVYDTVVITLKNMASHPVSLHAVGVSYWKASEGAEYDDQTSQREKEDDKVFPGGSHTYVWQVLKENGPMASDPLCLTYSYLSHVDLVKDLNSGLIGALLVCREGSLAKEKTQTLHKFILLFAVFDEGKSWHSETKNSLMQDRDAASARAWPKMHTVNGYVNRSLPGGPGASPGTSSTGSPGASPGTSSTGSPGTPGSGTASSSPGSSTPSGATGSPGTPGSGTASSSPGSSTPSGATGSPGTPGSGTASSSPGSSTPSGATGSPGSSTPSGATGSPGSSPSASTGTGPGSSPSASTGTGPGASPGTSSTGSPGTPGSGTASSSPGSSTPSGATGSPGSSPSASTGTGPGSSPSASTGTGPGASPGTSSTGSPGASPGTSSTGSPGSSTPSGATGSPGSSPSASTGTGPGASPGTSSTGSPGSSPSASTGTGPGTPGSGTASSSPGSSTPSGATGSGLIGCHRKSVYWHVIGMGTTPEVHSIFLEGHTFLVRNHRQASLEISPITFLTAQTLLMDLGQFLLFCHISSHQHDGMEAYVKVDSCPEEPQLRMKNNEEAEDYDDDLTDSEMDVVRFDDDNSPSFIQIRSVAKKHPKTWVHYIAAEEEDWDYAPLVLAPDDRSYKSQYLNNGPQRIGRKYKKVRFMAYTDETFKTREAIQHESGILGPLLYGEVGDTLLIIFKNQASRPYNIYPHGITDVRPLYSRRLPKGVKHLKDFPILPGEIFKYKWTVTVEDGPTKSDPRCLTRYYSSFVNMERDLASGLIGPLLICYKESVDQRGNQIMSDKRNVILFSVFDENRSWYLTENIQRFLPNPAGVQLEDPEFQASNIMHSINGYVFDSLQLSVCLHEVAYWYILSIGAQTDFLSVFFSGYTFKHKMVYEDTLTLFPFSGETVFMSMENPGLWILGCHNSDFRNRGMTALLKVSSCDKNTGDYYEDSYEDISAYLLSKNNAIEPRSFSQNPPVLKRHQREITRTTLQSDQEEIDYDDTISVEMKKEDFDIYDEDENQSPRSFQKKTRHYFIAAVERLWDYGMSSSPHVLRNRAQSGSVPQFKKVVFQEFTDGSFTQPLYRGELNEHLGLLGPYIRAEVEDNIMVTFRNQASRPYSFYSSLISYEEDQRQGAEPRKNFVKPNETKTYFWKVQHHMAPTKDEFDCKAWAYFSDVDLEKDVHSGLIGPLLVCHTNTLNPAHGRQVTVQEFALFFTIFDETKSWYFTENMERNCRAPCNIQMEDPTFKENYRFHAGINGYIMDTLPGLVMAQDQRIRWYLLSMGSNENIHSIHFSGHVFTVRKKEEYKMALYNLYPGVFETVEMLPSKAGIWRVECLIGEHLHAGMSTLFLVYSNKCQTPLGMASGHIRDFQITASGQYGQWAPKLARLHYSGSINAWSTKEPFSWIKVDLLAPMIIHGIKTQGARGSPAGSPTSTEEGTSESATPESGPGTSTEPSEGSAPGSPAGSPTSTEEGTSTEPSEGSAPGTSTEPSEGSAPGTSESATPESGPGSEPATSGSETPGSEPATSGSETPGSPAGSPTSTEEGTSESATPESGPGTSTEPSEGSAPGTSTEPSEGSAPGSPAGSPTSTEEGTSTEPSEGSAPGTSTEPSEGSAPGTSESATPESGPGTSTEPSEGSAPGTSESATPESGPGSEPATSGSETPGTSTEPSEGSAPGTSTEPSEGSAPGTSESATPESGPGTSESATPESGPGSPAGSPTSTEEGTSESATPESGPGSEPATSGSETPGTSESATPESGPGTSTEPSEGSAPGTSTEPSEGSAPGTSTEPSEGSAPGTSTEPSEGSAPGTSTEPSEGSAPGTSTEPSEGSAPGSPAGSPTSTEEGTSTEPSEGSAPGTSESATPESGPGSEPATSGSETPGTSESATPESGPGSEPATSGSETPGTSESATPESGPGTSTEPSEGSAPGTSESATPESGPGSPAGSPTSTEEGSPAGSPTSTEEGSPAGSPTSTEEGTSESATPESGPGTSTEPSEGSAPGQKFSSLYISQFIIMYSLDGKKWQTYRGNSTGTLMVFFGNVDSSGIKHNIFNPPIIARYIRLHPTHYSIRSTLRMELMGCDLNSCSMPLGMESKAISDAQITASSYFTNMFATWSPSKARLHLQGRSNAWRPQVNNPKEWLQVDFQKTMKVTGVTTQGVKSLLTSMYVKEFLISSSQDGHQWTLFFQNGKVKVFQGNQDSFTPVVNSLDPPLLTRYLRIHPQSWVHQIALRMEVLGCEAQDLYGGSPAGSPTSTEEGTSESATPESGPGTSTEPSEGSAPGSPAGSPTSTEEGTSTEPSEGSAPGTSTEPSEGSAPGTSESATPESGPGSEPATSGSETPGSEPATSGSETPGSPAGSPTSTEEGTSESATPESGPGTSTEPSEGSAPGTSTEPSEGSAPGSPAGSPTSTEEGTSTEPSEGSAPGTSTEPSEGSAPGTSESATPESGPGTSTEPSEGSAPGTSESATPESGPGSEPATSGSETPGTSTEPSEGSAPGTSTEPSEGSAPGTSESATPESGPGTSESATPESGPGSPAGSPTSTEEGTSESATPESGPGSEPATSGSETPGTSESATPESGPGTSTEPSEGSAPGTSTEPSEGSAPGTSTEPSEGSAPGTSTEPSEGSAPGTSTEPSEGSAPGTSTEPSEGSAPGSPAGSPTSTEEGTSTEPSEGSAPGTSESATPESGPGSEPATSGSETPGTSESATPESGPGSEPATSGSETPGTSESATPESGPGTSTEPSEGSAPGTSESATPESGPGSPAGSPTSTEEGSPAGSPTSTEEGSPAGSPTSTEEGTSESATPESGPGTSTEPSEGSAPGTSESATPESGPGSEPATSGSETPGTSESATPESGPGSEPATSGSETPGTSESATPESGPGTSTEPSEGSAPGSPAGSPTSTEEGTSESATPESGPGSEPATSGSETPGTSESATPESGPGSPAGSPTSTEEGSPAGSPTSTEEGTSTEPSEGSAPGTSESATPESGPGTSESATPESGPGTSESATPESGPGSEPATSGSETPGSEPATSGSETPGSPAGSPTSTEEGTSTEPSEGSAPGTSTEPSEGSAPGSEPATSGSETPGTSESATPESGPGTSTEPSEGSAP

SEQ ID NO: 898 - protein, 3347 aa, Artificial Sequence [sequence omitted]

SEQ ID NO: 899 - protein, 1614 aa, Artificial Sequence
  Description of Artificial Sequence: Synthetic polypeptide
ATRRYYLGAVELSWDYMQSDLGELPVDAGGAPSPSASTGTGPGTPGSGTASSSPGSSTPSGATGSPGPSGPGRFPPRVPKSFPFNTSVVYKKTLFVEFTVHLFNIAKPRPPWMGLLGPTIQAEVYDTVVITLKNMASHPVSLHAVGVSYWKASEGAEYDDQTSQREKEGGPGTPGSGTASSSPGSSTPSGATGSPGSSPSASTGTGPGASPGDDKVFPGGSHTYVWQVLKENGPMASDPLCLTYSYLSHVDLVKDLNSGLIGALLVCREGSLAKEKTQTLHKFILLFAVFDEGGSPSASTGTGPGASPGTSSTGSPGTPGSGTASSSPGSSTPSGAGKSWHSETKNSLMQDRDAASARAWPKMHTVNGYVNSSLPGLIGCHRKSVYWHVIGMGTTPEVHSIFLEGHTFLVRNHRQASLEISPITFLTAQTLLMDLGQFLLFCHISSHQHDGMEAYVKVDSCPEEPGSASTGTGPGASPGTSSTGSPGTPGSGTASSSPGSSTPSGATGGQLRMKNNEEAEDYDDDLTDSEMDVVRFDDDNSPSFIQIRSVAKKHPKTWVHYIAAEEEDWDYAPLVLAPDDRSYKSQYLNNGPQRIGRKYKKVRFMAYTDETFKTREAIQHESGILGPLLYGEVGDTLLIIFKNQASRPYNIYPHGITDVRPLYSRRLPKGVKHLKDFPILPGEIFKYKWTVTVEDGPTKSDPRCLTRYYSSFVNMERDLASGLIGPLLICYKESVDQRGNQIMSDKRNVILFSVFDENRSWYLTENIQRFLPNPAGVQLEDPEFQASNIMHSINGYVFDSLQLSVCLHEVAYWYILSIGAQTDFLSVFFSGYTFKHKMVYEDTLTLFPFSGETVFMSMENPGLWILGCHNSDFRNRGMTALLKVSSCDKNTGDYYEDSYEDISAYLLSKNNAIEPRSFSQNPPVLKRHQREITRTTLQSDQEEIDYDDTISVEMKKEDFDIYDEDENQSPRSFQKKTRHYFIAAVERLWDYGMSSSPHVLRNRAQSGSVPQFKKVVFQEFTDGSFTQPLYRGELNEHLGLLGPYIRAEVEDNIMVTFRNQASRPYSFYSSLISYEEDQRQGAEPRKNFVKPNETKTYFWKVQHHMAPTKDEFDCKAWAYFSDVDLEKDVHSGLIGPLLVCHTNTLNPAHGRQVTVQEFALFFTIFDETKSWYFTENMERNCRAPCNIQMEDPTFKENYRFHAINGYIMDTLPGLVMAQDQRIRWYLLSMGSNENIHSIHFSGHVFTVRKKEEYKMALYNLYPGVFETVEMLPSKAGIWRVECLIGEHLHAGMSTLFLVYSNKCQTPLGMASGHIRDFQITASGQYGQWAPKLARLHYSGSINAWSTKEPFSWIKVDLLAPMIIHGIKTQGARQKFSSLYISQFIIMYSLDGKKWQTYRGNSTGTLMVFFGNVDSSGIKHNIFNPPIIARYIRLHPTHYSIRSTLRMELMGCDLNSCSMPLGMESKAISDAQITASSYFTNMFATWTPSKARLHLQGRSNAWRPQVNNPKEWLQVDFQKTMKVTGVTTQGVKSLLTSMYVKEFLISSSQDGHQWTLFFQNGKVKVFQGNQDSFTPVVNSLDPPLLTRYLRIHPQSWVHQIALRMEVLGCEAQDLY

SEQ ID NO: 900 - protein, 2914 aa, Artificial Sequence [sequence omitted]

SEQ ID NO: 901 - protein, 2304 aa, Artificial Sequence
  Description of Artificial Sequence: Synthetic polypeptide
ATRRYYLGAVELSWDYMQSDLGELPVDARFPPRVPKSFPFNTSVVYKKTLFVEFTVHLFNIAKPRPPWMGLLGPTIQAEVYDTVVITLKNMASHPVSLHAVGVSYWKASEGAEYDDQTSQREKEDDKVFPGGSHTYVWQVLKENGPMASDPLCLTYSYLSHVDLVKDLNSGLIGALLVCREGSLAKEKTQTLHKFILLFAVFDEGKSWHSETKNSLMQDRDAASARAWPKMHTVNGYVNRSLPGLIGCHRKSVYWHVIGMGTTPEVHSIFLEGHTFLVRNHRQASLEISPITFLTAQTLLMDLGQFLLFCHISSHQHDGMEAYVKVDSCPEEPQLRMKNNEEAEDYDDDLTDSEMDVVRFDDDNSPSFIQIRSVAKKHPKTWVHYIAAEEEDWDYAPLVLAPDDRSYKSQYLNNGPQRIGRKYKKVRFMAYTDETFKTREAIQHESGILGPLLYGEVGDTLLIIFKNQASRPYNIYPHGITDVRPLYSRRLPKGVKHLKDFPILPGEIFKYKWTVTVEDGPTKSDPRCLTRYYSSFVNMERDLASGLIGPLLICYKESVDQRGNQIMSDKRNVILFSVFDENRSWYLTENIQRFLPNPAGVQLEDPEFQASNIMHSINGYVFDSLQLSVCLHEVAYWYILSIGAQTDFLSVFFSGYTFKHKMVYEDTLTLFPFSGETVFMSMENPGLWILGCHNSDFRNRGMTALLKVSSCDKNTGDYYEDSYEDISAYLLSKNNAIEPRSFSQNGGSPAGSPTSTEEGTSESATPESGPGTSTEPSEGSAPGSPAGSPTSTEEGTSTEPSEGSAPGTSTEPSEGSAPGTSESATPESGPGSEPATSGSETPGSEPATSGSETPGSPAGSPTSTEEGTSESATPESGPGTSTEPSEGSAPGTSTEPSEGSAPGSPAGSPTSTEEGTSTEPSEGSAPGTSTEPSEGSAPGTSESATPESGPGTSTEPSEGSAPGTSESATPESGPGSEPATSGSETPGTSTEPSEGSAPGTSTEPSEGSAPGTSESATPESGPGTSESATPESGPGSPAGSPTSTEEGTSESATPESGPGSEPATSGSETPGTSESATPESGPGTSTEPSEGSAPGTSTEPSEGSAPGTSTEPSEGSAPGTSTEPSEGSAPGTSTEPSEGSAPGTSTEPSEGSAPGSPAGSPTSTEEGTSTEPSEGSAPGTSESATPESGPGSEPATSGSETPGTSESATPESGPGSEPATSGSETPGTSESATPESGPGTSTEPSEGSAPGTSESATPESGPGSPAGSPTSTEEGSPAGSPTSTEEGSPAGSPTSTEEGTSESATPESGPGTSTEPSEGSAPGTSESATPESGPGSEPATSGSETPGTSESATPESGPGSEPATSGSETPGTSESATPESGPGTSTEPSEGSAPGSPAGSPTSTEEGTSESATPESGPGSEPATSGSETPGTSESATPESGPGSPAGSPTSTEEGSPAGSPTSTEEGTSTEPSEGSAPGTSESATPESGPGTSESATPESGPGTSESATPESGPGSEPATSGSETPGSEPATSGSETPGSPAGSPTSTEEGTSTEPSEGSAPGTSTEPSEGSAPGSEPATSGSETPGTSESATPESGPGTSTEPSEGSAPGPPVLKRHQREITRTTLQSDQEEIDYDDTISVEMKKEDFDIYDEDENQSPRSFQKKTRHYFIAAVERLWDYGMSSSPHVLRNRAQSGSVPQFKKVVFQEFTDGSFTQPLYRGELNEHLGLLGPYIRAEVEDNIMVTFRNQASRPYSFYSSLISYEEDQRQGAEPRKNFVKPNETKTYFWKVQHHMAPTKDEFDCKAWAYFSDVDLEKDVHSGLIGPLLVCHTNTLNPAHGRQVTVQEFALFFTIFDETKSWYFTENMERNCRAPCNIQMEDPTFKENYRFHAINGYIMDTLPGLVMAQDQRIRWYLLSMGSNENIHSIHFSGHVFTVRKKEEYKMALYNLYPGVFETVEMLPSKAGIWRVECLIGEHLHAGMSTLFLVYSNKCQTPLGMASGHIRDFQITASGQYGQWAPKLARLHYSGSINAWSTKEPFSWIKVDLLAPMIIHGIKTQGARQKFSSLYISQFIIMYSLDGKKWQTYRGNSTGTLMVFFGNVDSSGIKHNIFNPPIIARYIRLHPTHYSIRSTLRMELMGCDLNSCSMPLGMESKAISDAQITASSYFTNMFATWSPSKARLHLQGRSNAWRPQVNNPKEWLQVDFQKTMKVTGVTTQGVKSLLTSMYVKEFLISSSQDGHQWTLFFQNGKVKVFQGNQDSFTPVVNSLDPPLLTRYLRIHPQSWVHQIALRMEVLGCEAQDLY

SEQ ID NO: 902 - protein, 1728 aa, Artificial Sequence
  Description of Artificial Sequence: Synthetic polypeptide
ATRRYYLGAVELSWDYMQSDLGELPVDARFPPRVPKSFPFNTSVVYKKTLFVEFTVHLFNIAKPRPPWMGLLGPTIQAEVYDTVVITLKNMASHPVSLHAVGVSYWKASEGAEYDDQTSQREKEDDKVFPGGSHTYVWQVLKENGPMASDPLCLTYSYLSHVDLVKDLNSGLIGALLVCREGSLAKEKTQTLHKFILLFAVFDEGKSWHSETKNSLMQDRDAASARAWPKMHTVNGYVNRSLPGLIGCHRKSVYWHVIGMGTTPEVHSIFLEGHTFLVRNHRQASLEISPITFLTAQTLLMDLGQFLLFCHISSHQHDGMEAYVKVDSCPEEPQLRMKNNEEAEDYDDDLTDSEMDVVRFDDDNSPSFIQIRSVAKKHPKTWVHYIAAEEEDWDYAPLVLAPDDRSYKSQYLNNGPQRIGRKYKKVRFMAYTDETFKTREAIQHESGILGPLLYGEVGDTLLIIFKNQASRPYNIYPHGITDVRPLYSRRLPKGVKHLKDFPILPGEIFKYKWTVTVEDGPTKSDPRCLTRYYSSFVNMERDLASGLIGPLLICYKESVDQRGNQIMSDKRNVILFSVFDENRSWYLTENIQRFLPNPAGVQLEDPEFQASNIMHSINGYVFDSLQLSVCLHEVAYWYILSIGAQTDFLSVFFSGYTFKHKMVYEDTLTLFPFSGETVFMSMENPGLWILGCHNSDFRNRGMTALLKVSSCDKNTGDYYEDSYEDISAYLLSKNNAIEPRSFSQNGGTSESATPESGPGSEPATSGSETPGTSESATPESGPGSEPATSGSETPGTSESATPESGPGTSTEPSEGSAPGSPAGSPTSTEEGTSESATPESGPGSEPATSGSETPGTSESATPESGPGSPAGSPTSTEEGSPAGSPTSTEEGTSTEPSEGSAPGTSESATPESGPGTSESATPESGPGTSESATPESGPGSEPATSGSETPGSEPATSGSETPGSPAGSPTSTEEGTSTEPSEGSAPGTSTEPSEGSAPGSEPATSGSETPGTSESATPESGPGTSTEPSEGSAPGPPVLKRHQREITRTTLQSDQEEIDYDDTISVEMKKEDFDIYDEDENQSPRSFQKKTRHYFIAAVERLWDYGMSSSPHVLRNRAQSGSVPQFKKVVFQEFTDGSFTQPLYRGELNEHLGLLGPYIRAEVEDNIMVTFRNQASRPYSFYSSLISYEEDQRQGAEPRKNFVKPNETKTYFWKVQHHMAPTKDEFDCKAWAYFSDVDLEKDVHSGLIGPLLVCHTNTLNPAHGRQVTVQEFALFFTIFDETKSWYFTENMERNCRAPCNIQMEDPTFKENYRFHAINGYIMDTLPGLVMAQDQRIRWYLLSMGSNENIHSIHFSGHVFTVRKKEEYKMALYNLYPGVFETVEMLPSKAGIWRVECLIGEHLHAGMSTLFLVYSNKCQTPLGMASGHIRDFQITASGQYGQWAPKLARLHYSGSINAWSTKEPFSWIKVDLLAPMIIHGIKTQGARQKFSSLYISQFIIMYSLDGKKWQTYRGNSTGTLMVFFGNVDSSGIKHNIFNPPIIARYIRLHPTHYSIRSTLRMELMGCDLNSCSMPLGMESKAISDAQITASSYFTNMFATWSPSKARLHLQGRSNAWRPQVNNPKEWLQVDFQKTMKVTGVTTQGVKSLLTSMYVKEFLISSSQDGHQWTLFFQNGKVKVFQGNQDSFTPVVNSLDPPLLTRYLRIHPQSWVHQIALRMEVLGCEAQDLY

SEQ ID NO: 903 - protein, 1728 aa, Artificial Sequence
  Description of Artificial Sequence: Synthetic polypeptide
ATRRYYLGAVELSWDYMQSDLGELPVDARFPPRVPKSFPFNTSVVYKKTLFVEFTVHLFNIAKPRPPWMGLLGPTIQAEVYDTVVITLKNMASHPVSLHAVGVSYWKASEGAEYDDQTSQREKEDDKVFPGGSHTYVWQVLKENGPMASDPLCLTYSYLSHVDLVKDLNSGLIGALLVCREGSLAKEKTQTLHKFILLFAVFDEGKSWHSETKNSLMQDRDAASARAWPKMHTVNGYVNRSLPGLIGCHRKSVYWHVIGMGTTPEVHSIFLEGHTFLVRNHRQASLEISPITFLTAQTLLMDLGQFLLFCHISSHQHDGMEAYVKVDSCPEEPQLRMKNNEEAEDYDDDLTDSEMDVVRFDDDNSPSFIQIRSVAKKHPKTWVHYIAAEEEDWDYAPLVLAPDDRSYKSQYLNNGPQRIGRKYKKVRFMAYTDETFKTREAIQHESGILGPLLYGEVGDTLLIIFKNQASRPYNIYPHGITDVRPLYSRRLPKGVKHLKDFPILPGEIFKYKWTVTVEDGPTKSDPRCLTRYYSSFVNMERDLASGLIGPLLICYKESVDQRGNQIMSDKRNVILFSVFDENRSWYLTENIQRFLPNPAGVQLEDPEFQASNIMHSINGYVFDSLQLSVCLHEVAYWYILSIGAQTDFLSVFFSGYTFKHKMVYEDTLTLFPFSGETVFMSMENPGLWILGCHNSDFRNRGMTALLKVSSCDKNTGDYYEDSYEDISAYLLSKNNAIEPRSFSGGTSESATPESGPGSEPATSGSETPGTSESATPESGPGSEPATSGSETPGTSESATPESGPGTSTEPSEGSAPGSPAGSPTSTEEGTSESATPESGPGSEPATSGSETPGTSESATPESGPGSPAGSPTSTEEGSPAGSPTSTEEGTSTEPSEGSAPGTSESATPESGPGTSESATPESGPGTSESATPESGPGSEPATSGSETPGSEPATSGSETPGSPAGSPTSTEEGTSTEPSEGSAPGTSTEPSEGSAPGSEPATSGSETPGTSESATPESGPGTSTEPSEGSAPGQNPPVLKRHQREITRTTLQSDQEEIDYDDTISVEMKKEDFDIYDEDENQSPRSFQKKTRHYFIAAVERLWDYGMSSSPHVLRNRAQSGSVPQFKKVVFQEFTDGSFTQPLYRGELNEHLGLLGPYIRAEVEDNIMVTFRNQASRPYSFYSSLISYEEDQRQGAEPRKNFVKPNETKTYFWKVQHHMAPTKDEFDCKAWAYFSDVDLEKDVHSGLIGPLLVCHTNTLNPAHGRQVTVQEFALFFTIFDETKSWYFTENMERNCRAPCNIQMEDPTFKENYRFHAINGYIMDTLPGLVMAQDQRIRWYLLSMGSNENIHSIHFSGHVFTVRKKEEYKMALYNLYPGVFETVEMLPSKAGIWRVECLIGEHLHAGMSTLFLVYSNKCQTPLGMASGHIRDFQITASGQYGQWAPKLARLHYSGSINAWSTKEPFSWIKVDLLAPMIIHGIKTQGARQKFSSLYISQFIIMYSLDGKKWQTYRGNSTGTLMVFFGNVDSSGIKHNIFNPPIIARYIRLHPTHYSIRSTLRMELMGCDLNSCSMPLGMESKAISDAQITASSYFTNMFATWSPSKARLHLQGRSNAWRPQVNNPKEWLQVDFQKTMKVTGVTTQGVKSLLTSMYVKEFLISSSQDGHQWTLFFQNGKVKVFQGNQDSFTPVVNSLDPPLLTRYLRIHPQSWVHQIALRMEVLGCEAQDLY

SEQ ID NO: 904 - protein, 2046 aa, Artificial Sequence
  Description of Artificial Sequence: Synthetic polypeptide
ATRRYYLGAVELSWDYMQSDLGELPVDARFPPRVPKSFPFNTSVVYKKTLFVEFTVHLFNIAKPRPPWMGLLGPTIQAEVYDTVVITLKNMASHPVSLHAVGVSYWKASEGAEYDDQTSQREKEDDKVFPGGSHTYVWQVLKENGPMASDPLCLTYSYLSHVDLVKDLNSGLIGALLVCREGSLAKEKTQTLHKFILLFAVFDEGKSWHSETKNSLMQDRDAASARAWPKMHTVNGYVNRSLPGLIGCHRKSVYWHVIGMGTTPEVHSIFLEGHTFLVRNHRQASLEISPITFLTAQTLLMDLGQFLLFCHISSHQHDGMEAYVKVDSCPEEPQLRMKNNEEAEDYDDDLTDSEMDVVRFDDDNSPSFIQIRSVAKKHPKTWVHYIAAEEEDWDYAPLVLAPDDRSYKSQYLNNGPQRIGRKYKKVRFMAYTDETFKTREAIQHESGILGPLLYGEVGDTLLIIFKNQASRPYNIYPHGITDVRPLYSRRLPKGVKHLKDFPILPGEIFKYKWTVTVEDGPTKSDPRCLTRYYSSFVNMERDLASGLIGPLLICYKESVDQRGNQIMSDKRNVILFSVFDENRSWYLTENIQRFLPNPAGVQLEDPEFQASNIMHSINGYVFDSLQLSVCLHEVAYWYILSIGAQTDFLSVFFSGYTFKHKMVYEDTLTLFPFSGETVFMSMENPGLWILGCHNSDFRNRGMTALLKVSSCDKNTGDYYEDSYEDISAYLLSKNNAIEPRSFSQNGPGASPGTSSTGSPGASPGTSSTGSPGTPGSGTASSSPGSSTPSGATGSPGTPGSGTASSSPGSSTPSGATGSPGTPGSGTASSSPGSSTPSGATGSPGSSTPSGATGSPGSSPSASTGTGPGSSPSASTGTGPGASPGTSSTGSPGTPGSGTASSSPGSSTPSGATGSPGSSPSASTGTGPGSSPSASTGTGPGASPGTSSTGSPGASPGTSSTGSPGSSTPSGATGSPGSSPSASTGTGPGASPGTSSTGSPGSSPSASTGTGPGTPGSGTASSSPGSSTPSGATGSGPPVLKRHQREITRTTLQSDQEEIDYDDTISVEMKKEDFDIYDEDENQSPRSFQKKTRHYFIAAVERLWDYGMSSSPHVLRNRAQSGSVPQFKKVVFQEFTDGSFTQPLYRGELNEHLGLLGPYIRAEVEDNIMVTFRNQASRPYSFYSSLISYEEDQRQGAEPRKNFVKPNETKTYFWKVQHHMAPTKDEFDCKAWAYFSDVDLEKDVHSGLIGPLLVCHTNTLNPAHGRQVTVQEFALFFTIFDETKSWYFTENMERNCRAPCNIQMEDPTFKENYRFHAINGYIMDTLPGLVMAQDQRIRWYLLSMGSNENIHSIHFSGHVFTVRKKEEYKMALYNLYPGVFETVEMLPSKAGIWRVECLIGEHLHAGMSTLFLVYSNKCQTPLGMASGHIRDFQITASGQYGQWAPKLARLHYSGSINAWSTKEPFSWIKVDLLAPMIIHGIKTQGARQKFSSLYISQFIIMYSLDGKKWQTYRGNSTGTLMVFFGNVDSSGIKHNIFNPPIIARYIRLHPTHYSIRSTLRMELMGCDLNSCSMPLGMESKAISDAQITASSYFTNMFATWSPSKARLHLQGRSNAWRPQVNNPKEWLQVDFQKTMKVTGVTTQGVKSLLTSMYVKEFLISSSQDGHQWTLFFQNGKVKVFQGNQDSFTPVVNSLDPPLLTRYLRIHPQSWVHQIALRMEVLGCEAQDLYGAGSPGAETAPGASPGTSSTGSPGASPGTSSTGSPGTPGSGTASSSPGSSTPSGATGSPGTPGSGTASSSPGSSTPSGATGSPGTPGSGTASSSPGSSTPSGATGSPGSSTPSGATGSPGSSPSASTGTGPGSSPSASTGTGPGASPGTSSTGSPGTPGSGTASSSPGSSTPSGATGSPGSSPSASTGTGPGSSPSASTGTGPGASPGTSSTGSPGASPGTSSTGSPGSSTPSGATGSPGSSPSASTGTGPGASPGTSSTGSPGSSPSASTGTGPGTPGSGTASSSPGSSTPSGATGSGAETAEQKLISEEDLSPATG

SEQ ID NO: 905 - protein, 2046 aa, Artificial Sequence
  Description of Artificial Sequence: Synthetic polypeptide
ATRRYYLGAVELSWDYMQSDLGELPVDARFPPRVPKSFPFNTSVVYKKTLFVEFTVHLFNIAKPRPPWMGLLGPTIQAEVYDTVVITLKNMASHPVSLHAVGVSYWKASEGAEYDDQTSQREKEDDKVFPGGSHTYVWQVLKENGPMASDPLCLTYSYLSHVDLVKDLNSGLIGALLVCREGSLAKEKTQTLHKFILLFAVFDEGKSWHSETKNSLMQDRDAASARAWPKMHTVNGYVNRSLPGLIGCHRKSVYWHVIGMGTTPEVHSIFLEGHTFLVRNHRQASLEISPITFLTAQTLLMDLGQFLLFCHISSHQHDGMEAYVKVDSCPEEPQLRMKNNEEAEDYDDDLTDSEMDVVRFDDDNSPSFIQIRSVAKKHPKTWVHYIAAEEEDWDYAPLVLAPDDRSYKSQYLNNGPQRIGRKYKKVRFMAYTDETFKTREAIQHESGILGPLLYGEVGDTLLIIFKNQASRPYNIYPHGITDVRPLYSRRLPKGVKHLKDFPILPGEIFKYKWTVTVEDGPTKSDPRCLTRYYSSFVNMERDLASGLIGPLLICYKESVDQRGNQIMSDKRNVILFSVFDENRSWYLTENIQRFLPNPAGVQLEDPEFQASNIMHSINGYVFDSLQLSVCLHEVAYWYILSIGAQTDFLSVFFSGYTFKHKMVYEDTLTLFPFSGETVFMSMENPGLWILGCHNSDFRNRGMTALLKVSSCDKNTGDYYEDSYEDISAYLLSKNNAIEPRSFSGPGASPGTSSTGSPGASPGTSSTGSPGTPGSGTASSSPGSSTPSGATGSPGTPGSGTASSSPGSSTPSGATGSPGTPGSGTASSSPGSSTPSGATGSPGSSTPSGATGSPGSSPSASTGTGPGSSPSASTGTGPGASPGTSSTGSPGTPGSGTASSSPGSSTPSGATGSPGSSPSASTGTGPGSSPSASTGTGPGASPGTSSTGSPGASPGTSSTGSPGSSTPSGATGSPGSSPSASTGTGPGASPGTSSTGSPGSSPSASTGTGPGTPGSGTASSSPGSSTPSGATGSGQNPPVLKRHQREITRTTLQSDQEEIDYDDTISVEMKKEDFDIYDEDENQSPRSFQKKTRHYFIAAVERLWDYGMSSSPHVLRNRAQSGSVPQFKKVVFQEFTDGSFTQPLYRGELNEHLGLLGPYIRAEVEDNIMVTFRNQASRPYSFYSSLISYEEDQRQGAEPRKNFVKPNETKTYFWKVQHHMAPTKDEFDCKAWAYFSDVDLEKDVHSGLIGPLLVCHTNTLNPAHGRQVTVQEFALFFTIFDETKSWYFTENMERNCRAPCNIQMEDPTFKENYRFHAINGYIMDTLPGLVMAQDQRIRWYLLSMGSNENIHSIHFSGHVFTVRKKEEYKMALYNLYPGVFETVEMLPSKAGIWRVECLIGEHLHAGMSTLFLVYSNKCQTPLGMASGHIRDFQITASGQYGQWAPKLARLHYSGSINAWSTKEPFSWIKVDLLAPMIIHGIKTQGARQKFSSLYISQFIIMYSLDGKKWQTYRGNSTGTLMVFFGNVDSSGIKHNIFNPPIIARYIRLHPTHYSIRSTLRMELMGCDLNSCSMPLGMESKAISDAQITASSYFTNMFATWSPSKARLHLQGRSNAWRPQVNNPKEWLQVDFQKTMKVTGVTTQGVKSLLTSMYVKEFLISSSQDGHQWTLFFQNGKVKVFQGNQDSFTPVVNSLDPPLLTRYLRIHPQSWVHQIALRMEVLGCEAQDLYGAGSPGAETAPGASPGTSSTGSPGASPGTSSTGSPGTPGSGTASSSPGSSTPSGATGSPGTPGSGTASSSPGSSTPSGATGSPGTPGSGTASSSPGSSTPSGATGSPGSSTPSGATGSPGSSPSASTGTGPGSSPSASTGTGPGASPGTSSTGSPGTPGSGTASSSPGSSTPSGATGSPGSSPSASTGTGPGSSPSASTGTGPGASPGTSSTGSPGASPGTSSTGSPGSSTPSGATGSPGSSPSASTGTGPGASPGTSSTGSPGSSPSASTGTGPGTPGSGTASSSPGSSTPSGATGSGAETAEQKLISEEDLSPATG

SEQ ID NO: 906 - protein, 2017 aa, Artificial Sequence
  Description of Artificial Sequence: Synthetic polypeptide
ATRRYYLGAVELSWDYMQSDLGELPVDARFPPRVPKSFPFNTSVVYKKTLFVEFTDHLFNIAKPRPPWMGLLGPTIQAEVYDTVVITLKNMASHPVSLHAVGVSYWKASEGAEYDDQTSQREKEDDKVFPGGSHTYVWQVLKENGPMASDPLCLTYSYLSHVDLVKDLNSGLIGALLVCREGSLAKEKTQTLHKFILLFAVFDEGKSWHSETKNSLMQDRDAASARAWPKMHTVNGYVNRSLPGLIGCHRKSVYWHVIGMGTTPEVHSIFLEGHTFLVRNHRQASLEISPITFLTAQTLLMDLGQFLLFCHISSHQHDGMEAYVKVDSCPEEPQLRMKNNEEAEDYDDDLTDSEMDVVRFDDDNSPSFIQIRSVAKKHPKTWVHYIAAEEEDWDYAPLVLAPDDRSYKSQYLNNGPQRIGRKYKKVRFMAYTDETFKTREAIQHESGILGPLLYGEVGDTLLIIFKNQASRPYNIYPHGITDVRPLYSRRLPKGVKHLKDFPILPGEIFKYKWTVTVEDGPTKSDPRCLTRYYSSFVNMERDLASGLIGPLLICYKESVDQRGNQIMSDKRNVILFSVFDENRSWYLTENIQRFLPNPAGVQLEDPEFQASNIMHSINGYVFDSLQLSVCLHEVAYWYILSIGAQTDFLSVFFSGYTFKHKMVYEDTLTLFPFSGETVFMSMENPGLWILGCHNSDFRNRGMTALLKVSSCDKNTGDYYEDSYEDISAYLLSKNNAIEPRSFSQNGGTSESATPESGPGSEPATSGSETPGTSESATPESGPGSEPATSGSETPGTSESATPESGPGTSTEPSEGSAPGSPAGSPTSTEEGTSESATPESGPGSEPATSGSETPGTSESATPESGPGSPAGSPTSTEEGSPAGSPTSTEEGTSTEPSEGSAPGTSESATPESGPGTSESATPESGPGTSESATPESGPGSEPATSGSETPGSEPATSGSETPGSPAGSPTSTEEGTSTEPSEGSAPGTSTEPSEGSAPGSEPATSGSETPGTSESATPESGPGTSTEPSEGSAPGPPVLKRHQAEITRTTLQSDQEEIDYDDTISVEMKKEDFDIYDEDENQSPRSFQKKTRHYFIAAVERLWDYGMSSSPHVLRNRAQSGSVPQFKKVVFQEFTDGSFTQPLYRGELNEHLGLLGPYIRAEVEDNIMVTFRNQASRPYSFYSSLISYEEDQRQGAEPRKNFVKPNETKTYFWKVQHHMAPTKDEFDCKAWAYFSDVDLEKDVHSGLIGPLLVCHTNTLNPAHGRQVTVQEFALFFTIFDETKSWYFTENMERNCRAPCNIQMEDPTFKENYRFHAINGYIMDTLPGLVMAQDQRIRWYLLSMGSNENIHSIHFSGHVFTVRKKEEYKMALYNLYPGVFETVEMLPSKAGIWRVECLIGEHLHAGMSTLFLVYSNKCQTPLGMASGHIRDFQITASGQYGQWAPKLARLHYSGSINAWSTKEPFSWIKVDLLAPMIIHGIKTQGARQKFSSLYISQFIIMYSLDGKKWQTYRGNSTGTLMVFFGNVDSSGIKHNIFNPPIIARYIRLHPTHYSIRSTLRMELMGCDLNSCSMPLGMESKAISDAQITASSYFTNMFATWSPSKARLHLQGRSNAWRPQVNNPKEWLQVDFQKTMKVTGVTTQGVKSLLTSMYVKEFLISSSQDGHQWTLFFQNGKVKVFQGNQDSFTPVVNSLDPPLLTRYLRIHPQSWVHQIALRMEVLGCEAQDLYGGTSESATPESGPGSEPATSGSETPGTSESATPESGPGSEPATSGSETPGTSESATPESGPGTSTEPSEGSAPGSPAGSPTSTEEGTSESATPESGPGSEPATSGSETPGTSESATPESGPGSPAGSPTSTEEGSPAGSPTSTEEGTSTEPSEGSAPGTSESATPESGPGTSESATPESGPGTSESATPESGPGSEPATSGSETPGSEPATSGSETPGSPAGSPTSTEEGTSTEPSEGSAPGTSTEPSEGSAPGSEPATSGSETPGTSESATPESGPGTSTEPSEGSAP

SEQ ID NO: 907 - protein, 2017 aa, Artificial Sequence
  Description of Artificial Sequence: Synthetic polypeptide
ATRRYYLGAVELSWDYMQSDLGELPVDARFPPRVPKSFPFNTSVVYKKTLFVEFTDHLFNIAKPRPPWMGLLGPTIQAEVYDTVVITLKNMASHPVSLHAVGVSYWKASEGAEYDDQTSQREKEDDKVFPGGSHTYVWQVLKENGPMASDPLCLTYSYLSHVDLVKDLNSGLIGALLVCREGSLAKEKTQTLHKFILLFAVFDEGKSWHSETKNSLMQDRDAASARAWPKMHTVNGYVNRSLPGLIGCHRKSVYWHVIGMGTTPEVHSIFLEGHTFLVRNHRQASLEISPITFLTAQTLLMDLGQFLLFCHISSHQHDGMEAYVKVDSCPEEPQLRMKNNEEAEDYDDDLTDSEMDVVRFDDDNSPSFIQIRSVAKKHPKTWVHYIAAEEEDWDYAPLVLAPDDRSYKSQYLNNGPQRIGRKYKKVRFMAYTDETFKTREAIQHESGILGPLLYGEVGDTLLIIFKNQASRPYNIYPHGITDVRPLYSRRLPKGVKHLKDFPILPGEIFKYKWTVTVEDGPTKSDPRCLTRYYSSFVNMERDLASGLIGPLLICYKESVDQRGNQIMSDKRNVILFSVFDENRSWYLTENIQRFLPNPAGVQLEDPEFQASNIMHSINGYVFDSLQLSVCLHEVAYWYILSIGAQTDFLSVFFSGYTFKHKMVYEDTLTLFPFSGETVFMSMENPGLWILGCHNSDFRNRGMTALLKVSSCDKNTGDYYEDSYEDISAYLLSKNNAIEPRSFSGGTSESATPESGPGSEPATSGSETPGTSESATPESGPGSEPATSGSETPGTSESATPESGPGTSTEPSEGSAPGSPAGSPTSTEEGTSESATPESGPGSEPATSGSETPGTSESATPESGPGSPAGSPTSTEEGSPAGSPTSTEEGTSTEPSEGSAPGTSESATPESGPGTSESATPESGPGTSESATPESGPGSEPATSGSETPGSEPATSGSETPGSPAGSPTSTEEGTSTEPSEGSAPGTSTEPSEGSAPGSEPATSGSETPGTSESATPESGPGTSTEPSEGSAPGQNPPVLKRHQAEITRTTLQSDQEEIDYDDTISVEMKKEDFDIYDEDENQSPRSFQKKTRHYFIAAVERLWDYGMSSSPHVLRNRAQSGSVPQFKKVVFQEFTDGSFTQPLYRGELNEHLGLLGPYIRAEVEDNIMVTFRNQASRPYSFYSSLISYEEDQRQGAEPRKNFVKPNETKTYFWKVQHHMAPTKDEFDCKAWAYFSDVDLEKDVHSGLIGPLLVCHTNTLNPAHGRQVTVQEFALFFTIFDETKSWYFTENMERNCRAPCNIQMEDPTFKENYRFHAINGYIMDTLPGLVMAQDQRIRWYLLSMGSNENIHSIHFSGHVFTVRKKEEYKMALYNLYPGVFETVEMLPSKAGIWRVECLIGEHLHAGMSTLFLVYSNKCQTPLGMASGHIRDFQITASGQYGQWAPKLARLHYSGSINAWSTKEPFSWIKVDLLAPMIIHGIKTQGARQKFSSLYISQFIIMYSLDGKKWQTYRGNSTGTLMVFFGNVDSSGIKHNIFNPPIIARYIRLHPTHYSIRSTLRMELMGCDLNSCSMPLGMESKAISDAQITASSYFTNMFATWSPSKARLHLQGRSNAWRPQVNNPKEWLQVDFQKTMKVTGVTTQGVKSLLTSMYVKEFLISSSQDGHQWTLFFQNGKVKVFQGNQDSFTPVVNSLDPPLLTRYLRIHPQSWVHQIALRMEVLGCEAQDLYGGTSESATPESGPGSEPATSGSETPGTSESATPESGPGSEPATSGSETPGTSESATPESGPGTSTEPSEGSAPGSPAGSPTSTEEGTSESATPESGPGSEPATSGSETPGTSESATPESGPGSPAGSPTSTEEGSPAGSPTSTEEGTSTEPSEGSAPGTSESATPESGPGTSESATPESGPGTSESATPESGPGSEPATSGSETPGSEPATSGSETPGSPAGSPTSTEEGTSTEPSEGSAPGTSTEPSEGSAPGSEPATSGSETPGTSESATPESGPGTSTEPSEGSAP

SEQ ID NO: 908 - protein, 2045 aa, Artificial Sequence
  Description of Artificial Sequence: Synthetic polypeptide
ATRRYYLGAVELSWDYMQSDLGELPVDARFPPRVPKSFPFNTSVVYKKTLFVEFTDHLFNIAKPRPPWMGLLGPTIQAEVYDTVVITLKNMASHPVSLHAVGVSYWKASEGAEYDDQTSQREKEDDKVFPGGSHTYVWQVLKENGPMASDPLCLTYSYLSHVDLVKDLNSGLIGALLVCREGSLAKEKTQTLHKFILLFAVFDEGKSWHSETKNSLMQDRDAASARAWPKMHTVNGYVNRSLPGLIGCHRKSVYWHVIGMGTTPEVHSIFLEGHTFLVRNHRQASLEISPITFLTAQTLLMDLGQFLLFCHISSHQHDGMEAYVKVDSCPEEPQLRMKNNEEAEDYDDDLTDSEMDVVRFDDDNSPSFIQIRSVAKKHPKTWVHYIAAEEEDWDYAPLVLAPDDRSYKSQYLNNGPQRIGRKYKKVRFMAYTDETFKTREAIQHESGILGPLLYGEVGDTLLIIFKNQASRPYNIYPHGITDVRPLYSRRLPKGVKHLKDFPILPGEIFKYKWTVTVEDGPTKSDPRCLTRYYSSFVNMERDLASGLIGPLLICYKESVDQRGNQIMSDKRNVILFSVFDENRSWYLTENIQRFLPNPAGVQLEDPEFQASNIMHSINGYVFDSLQLSVCLHEVAYWYILSIGAQTDFLSVFFSGYTFKHKMVYEDTLTLFPFSGETVFMSMENPGLWILGCHNSDFRNRGMTALLKVSSCDKNTGDYYEDSYEDISAYLLSKNNAIEPRSFSQNGPGASPGTSSTGSPGASPGTSSTGSPGTPGSGTASSSPGSSTPSGATGSPGTPGSGTASSSPGSSTPSGATGSPGTPGSGTASSSPGSSTPSGATGSPGSSTPSGATGSPGSSPSASTGTGPGSSPSASTGTGPGASPGTSSTGSPGTPGSGTASSSPGSSTPSGATGSPGSSPSASTGTGPGSSPSASTGTGPGASPGTSSTGSPGASPGTSSTGSPGSSTPSGATGSPGSSPSASTGTGPGASPGTSSTGSPGSSPSASTGTGPGTPGSGTASSSPGSSTPSGATGSPPVLKRHQAEITRTTLQSDQEEIDYDDTISVEMKKEDFDIYDEDENQSPRSFQKKTRHYFIAAVERLWDYGMSSSPHVLRNRAQSGSVPQFKKVVFQEFTDGSFTQPLYRGELNEHLGLLGPYIRAEVEDNIMVTFRNQASRPYSFYSSLISYEEDQRQGAEPRKNFVKPNETKTYFWKVQHHMAPTKDEFDCKAWAYFSDVDLEKDVHSGLIGPLLVCHTNTLNPAHGRQVTVQEFALFFTIFDETKSWYFTENMERNCRAPCNIQMEDPTFKENYRFHAINGYIMDTLPGLVMAQDQRIRWYLLSMGSNENIHSIHFSGHVFTVRKKEEYKMALYNLYPGVFETVEMLPSKAGIWRVECLIGEHLHAGMSTLFLVYSNKCQTPLGMASGHIRDFQITASGQYGQWAPKLARLHYSGSINAWSTKEPFSWIKVDLLAPMIIHGIKTQGARQKFSSLYISQFIIMYSLDGKKWQTYRGNSTGTLMVFFGNVDSSGIKHNIFNPPIIARYIRLHPTHYSIRSTLRMELMGCDLNSCSMPLGMESKAISDAQITASSYFTNMFATWSPSKARLHLQGRSNAWRPQVNNPKEWLQVDFQKTMKVTGVTTQGVKSLLTSMYVKEFLISSSQDGHQWTLFFQNGKVKVFQGNQDSFTPVVNSLDPPLLTRYLRIHPQSWVHQIALRMEVLGCEAQDLYGAGSPGAETAPGASPGTSSTGSPGASPGTSSTGSPGTPGSGTASSSPGSSTPSGATGSPGTPGSGTASSSPGSSTPSGATGSPGTPGSGTASSSPGSSTPSGATGSPGSSTPSGATGSPGSSPSASTGTGPGSSPSASTGTGPGASPGTSSTGSPGTPGSGTASSSPGSSTPSGATGSPGSSPSASTGTGPGSSPSASTGTGPGASPGTSSTGSPGASPGTSSTGSPGSSTPSGATGSPGSSPSASTGTGPGASPGTSSTGSPGSSPSASTGTGPGTPGSGTASSSPGSSTPSGATGSGAETAEQKLISEEDLSPATG

SEQ ID NO: 909 - protein, 2045 aa, Artificial Sequence
  Description of Artificial Sequence: Synthetic polypeptide
ATRRYYLGAVELSWDYMQSDLGELPVDARFPPRVPKSFPFNTSVVYKKTLFVEFTDHLFNIAKPRPPWMGLLGPTIQAEVYDTVVITLKNMASHPVSLHAVGVSYWKASEGAEYDDQTSQREKEDDKVFPGGSHTYVWQVLKENGPMASDPLCLTYSYLSHVDLVKDLNSGLIGALLVCREGSLAKEKTQTLHKFILLFAVFDEGKSWHSETKNSLMQDRDAASARAWPKMHTVNGYVNRSLPGLIGCHRKSVYWHVIGMGTTPEVHSIFLEGHTFLVRNHRQASLEISPITFLTAQTLLMDLGQFLLFCHISSHQHDGMEAYVKVDSCPEEPQLRMKNNEEAEDYDDDLTDSEMDVVRFDDDNSPSFIQIRSVAKKHPKTWVHYIAAEEEDWDYAPLVLAPDDRSYKSQYLNNGPQRIGRKYKKVRFMAYTDETFKTREAIQHESGILGPLLYGEVGDTLLIIFKNQASRPYNIYPHGITDVRPLYSRRLPKGVKHLKDFPILPGEIFKYKWTVTVEDGPTKSDPRCLTRYYSSFVNMERDLASGLIGPLLICYKESVDQRGNQIMSDKRNVILFSVFDENRSWYLTENIQRFLPNPAGVQLEDPEFQASNIMHSINGYVFDSLQLSVCLHEVAYWYILSIGAQTDFLSVFFSGYTFKHKMVYEDTLTLFPFSGETVFMSMENPGLWILGCHNSDFRNRGMTALLKVSSCDKNTGDYYEDSYEDISAYLLSKNNAIEPRSFSGPGASPGTSSTGSPGASPGTSSTGSPGTPGSGTASSSPGSSTPSGATGSPGTPGSGTASSSPGSSTPSGATGSPGTPGSGTASSSPGSSTPSGATGSPGSSTPSGATGSPGSSPSASTGTGPGSSPSASTGTGPGASPGTSSTGSPGTPGSGTASSSPGSSTPSGATGSPGSSPSASTGTGPGSSPSASTGTGPGASPGTSSTGSPGASPGTSSTGSPGSSTPSGATGSPGSSPSASTGTGPGASPGTSSTGSPGSSPSASTGTGPGTPGSGTASSSPGSSTPSGATGSQNPPVLKRHQAEITRTTLQSDQEEIDYDDTISVEMKKEDFDIYDEDENQSPRSFQKKTRHYFIAAVERLWDYGMSSSPHVLRNRAQSGSVPQFKKVVFQEFTDGSFTQPLYRGELNEHLGLLGPYIRAEVEDNIMVTFRNQASRPYSFYSSLISYEEDQRQGAEPRKNFVKPNETKTYFWKVQHHMAPTKDEFDCKAWAYFSDVDLEKDVHSGLIGPLLVCHTNTLNPAHGRQVTVQEFALFFTIFDETKSWYFTENMERNCRAPCNIQMEDPTFKENYRFHAINGYIMDTLPGLVMAQDQRIRWYLLSMGSNENIHSIHFSGHVFTVRKKEEYKMALYNLYPGVFETVEMLPSKAGIWRVECLIGEHLHAGMSTLFLVYSNKCQTPLGMASGHIRDFQITASGQYGQWAPKLARLHYSGSINAWSTKEPFSWIKVDLLAPMIIHGIKTQGARQKFSSLYISQFIIMYSLDGKKWQTYRGNSTGTLMVFFGNVDSSGIKHNIFNPPIIARYIRLHPTHYSIRSTLRMELMGCDLNSCSMPLGMESKAISDAQITASSYFTNMFATWSPSKARLHLQGRSNAWRPQVNNPKEWLQVDFQKTMKVTGVTTQGVKSLLTSMYVKEFLISSSQDGHQWTLFFQNGKVKVFQGNQDSFTPVVNSLDPPLLTRYLRIHPQSWVHQIALRMEVLGCEAQDLYGAGSPGAETAPGASPGTSSTGSPGASPGTSSTGSPGTPGSGTASSSPGSSTPSGATGSPGTPGSGTASSSPGSSTPSGATGSPGTPGSGTASSSPGSSTPSGATGSPGSSTPSGATGSPGSSPSASTGTGPGSSPSASTGTGPGASPGTSSTGSPGTPGSGTASSSPGSSTPSGATGSPGSSPSASTGTGPGSSPSASTGTGPGASPGTSSTGSPGASPGTSSTGSPGSSTPSGATGSPGSSPSASTGTGPGASPGTSSTGSPGSSPSASTGTGPGTPGSGTASSSPGSSTPSGATGSGAETAEQKLISEEDLSPATG

SEQ ID NO: 910 - protein, 2301 aa, Artificial Sequence
  Description of Artificial Sequence: Synthetic polypeptide
MQIELSTCFFLCLLRFCFSGTSESATPESGPGSEPATSGSETPGTSESATPESGPGSEPATSGSETPGTSESATPESGPGTSTEPSEGSAPGSPAGSPTSTEEGTSESATPESGPGSEPATSGSETPGTSESATPESGPGSPAGSPTSTEEGSPAGSPTSTEEGTSTEPSEGSAPGTSESATPESGPGTSESATPESGPGTSESATPESGPGSEPATSGSETPGSEPATSGSETPGSPAGSPTSTEEGTSTEPSEGSAPGTSTEPSEGSAPGSEPATSGSETPGTSESATPESGPGTSTEPSEGSAPQSPRSFQGPEGPSATRRYYLGAVELSWDYMQSDLGELPVDARFPPRVPKSFPFNTSVVYKKTLFVEFTVHLFNIAKPRPPWMGLLGPTIQAEVYDTVVITLKNMASHPVSLHAVGVSYWKASEGAEYDDQTSQREKEDDKVFPGGSHTYVWQVLKENGPMASDPLCLTYSYLSHVDLVKDLNSGLIGALLVCREGSLAKEKTQTLHKFILLFAVFDEGKSWHSETKNSLMQDRDAASARAWPKMHTVNGYVNRSLPGLIGCHRKSVYWHVIGMGTTPEVHSIFLEGHTFLVRNHRQASLEISPITFLTAQTLLMDLGQFLLFCHISSHQHDGMEAYVKVDSCPEEPQLRMKNNEEAEDYDDDLTDSEMDVVRFDDDNSPSFIQIRSVAKKHPKTWVHYIAAEEEDWDYAPLVLAPDDRSYKSQYLNNGPQRIGRKYKKVRFMAYTDETFKTREAIQHESGILGPLLYGEVGDTLLIIFKNQASRPYNIYPHGITDVRPLYSRRLPKGVKHLKDFPILPGEIFKYKWTVTVEDGPTKSDPRCLTRYYSSFVNMERDLASGLIGPLLICYKESVDQRGNQIMSDKRNVILFSVFDENRSWYLTENIQRFLPNPAGVQLEDPEFQASNIMHSINGYVFDSLQLSVCLHEVAYWYILSIGAQTDFLSVFFSGYTFKHKMVYEDTLTLFPFSGETVFMSMENPGLWILGCHNSDFRNRGMTALLKVSSCDKNTGDYYEDSYEDISAYLLSKNNAIEPRSFSQNGTSESATPESGPGSEPATSGSETPGTSESATPESGPGSEPATSGSETPGTSESATPESGPGTSTEPSEGSAPGSPAGSPTSTEEGTSESATPESGPGSEPATSGSETPGTSESATPESGPGSPAGSPTSTEEGSPAGSPTSTEEGTSTEPSEGSAPGTSESATPESGPGTSESATPESGPGTSESATPESGPGSEPATSGSETPGSEPATSGSETPGSPAGSPTSTEEGTSTEPSEGSAPGTSTEPSEGSAPGSEPATSGSETPGTSESATPESGPGTSTEPSEGSAPQSPRSFQKKTRHYFIAAVERLWDYGMSSSPHVLRNRAQSGSVPQFKKVVFQEFTDGSFTQPLYRGELNEHLGLLGPYIRAEVEDNIMVTFRNQASRPYSFYSSLISYEEDQRQGAEPRKNFVKPNETKTYFWKVQHHMAPTKDEFDCKAWAYFSDVDLEKDVHSGLIGPLLVCHTNTLNPAHGRQVTVQEFALFFTIFDETKSWYFTENMERNCRAPCNIQMEDPTFKENYRFHAINGYIMDTLPGLVMAQDQRIRWYLLSMGSNENIHSIHFSGHVFTVRKKEEYKMALYNLYPGVFETVEMLPSKAGIWRVECLIGEHLHAGMSTLFLVYSNKCQTPLGMASGHIRDFQITASGQYGQWAPKLARLHYSGSINAWSTKEPFSWIKVDLLAPMIIHGIKTQGARQKFSSLYISQFIIMYSLDGKKWQTYRGNSTGTLMVFFGNVDSSGIKHNIFNPPIIARYIRLHPTHYSIRSTLRMELMGCDLNSCSMPLGMESKAISDAQITASSYFTNMFATWSPSKARLHLQGRSNAWRPQVNNPKEWLQVDFQKTMKVTGVTTQGVKSLLTSMYVKEFLISSSQDGHQWTLFFQNGKVKVFQGNQDSFTPVVNSLDPPLLTRYLRIHPQSWVHQIALRMEVLGCEAQDLYGPEGPSQSPRSFQGTSESATPESGPGSEPATSGSETPGTSESATPESGPGSEPATSGSETPGTSESATPESGPGTSTEPSEGSAPGSPAGSPTSTEEGTSESATPESGPGSEPATSGSETPGTSESATPESGPGSPAGSPTSTEEGSPAGSPTSTEEGTSTEPSEGSAPGTSESATPESGPGTSESATPESGPGTSESATPESGPGSEPATSGSETPGSEPATSGSETPGSPAGSPTSTEEGTSTEPSEGSAPGTSTEPSEGSAPGSEPATSGSETPGTSESATPESGPGTSTEPSEGSAP

SEQ ID NO: 911 - protein, 2876 aa, Artificial Sequence
  Description of Artificial Sequence: Synthetic polypeptide
MQIELSTCFFLCLLRFCFSGSPAGSPTSTEEGTSESATPESGPGTSTEPSEGSAPGSPAGSPTSTEEGTSTEPSEGSAPGTSTEPSEGSAPGTSESATPESGPGSEPATSGSETPGSEPATSGSETPGSPAGSPTSTEEGTSESATPESGPGTSTEPSEGSAPGTSTEPSEGSAPGSPAGSPTSTEEGTSTEPSEGSAPGTSTEPSEGSAPGTSESATPESGPGTSTEPSEGSAPGTSESATPESGPGSEPATSGSETPGTSTEPSEGSAPGTSTEPSEGSAPGTSESATPESGPGTSESATPESGPGSPAGSPTSTEEGTSESATPESGPGSEPATSGSETPGTSESATPESGPGTSTEPSEGSAPGTSTEPSEGSAPGTSTEPSEGSAPGTSTEPSEGSAPGTSTEPSEGSAPGTSTEPSEGSAPGSPAGSPTSTEEGTSTEPSEGSAPGTSESATPESGPGSEPATSGSETPGTSESATPESGPGSEPATSGSETPGTSESATPESGPGTSTEPSEGSAPGTSESATPESGPGSPAGSPTSTEEGSPAGSPTSTEEGSPAGSPTSTEEGTSESATPESGPGTSTEPSEGSAPQSPRSFQGPSGPATRRYYLGAVELSWDYMQSDLGELPVDARFPPRVPKSFPFNTSVVYKKTLFVEFTVHLFNIAKPRPPWMGLLGPTIQAEVYDTVVITLKNMASHPVSLHAVGVSYWKASEGAEYDDQTSQREKEDDKVFPGGSHTYVWQVLKENGPMASDPLCLTYSYLSHVDLVKDLNSGLIGALLVCREGSLAKEKTQTLHKFILLFAVFDEGKSWHSETKNSLMQDRDAASARAWPKMHTVNGYVNRSLPGLIGCHRKSVYWHVIGMGTTPEVHSIFLEGHTFLVRNHRQASLEISPITFLTAQTLLMDLGQFLLFCHISSHQHDGMEAYVKVDSCPEEPQLRMKNNEEAEDYDDDLTDSEMDVVRFDDDNSPSFIQIRSVAKKHPKTWVHYIAAEEEDWDYAPLVLAPDDRSYKSQYLNNGPQRIGRKYKKVRFMAYTDETFKTREAIQHESGILGPLLYGEVGDTLLIIFKNQASRPYNIYPHGITDVRPLYSRRLPKGVKHLKDFPILPGEIFKYKWTVTVEDGPTKSDPRCLTRYYSSFVNMERDLASGLIGPLLICYKESVDQRGNQIMSDKRNVILFSVFDENRSWYLTENIQRFLPNPAGVQLEDPEFQASNIMHSINGYVFDSLQLSVCLHEVAYWYILSIGAQTDFLSVFFSGYTFKHKMVYEDTLTLFPFSGETVFMSMENPGLWILGCHNSDFRNRGMTALLKVSSCDKNTGDYYEDSYEDISAYLLSKNNAIEPRSFSQNGSPAGSPTSTEEGTSESATPESGPGTSTEPSEGSAPGSPAGSPTSTEEGTSTEPSEGSAPGTSTEPSEGSAPGTSESATPESGPGSEPATSGSETPGSEPATSGSETPGSPAGSPTSTEEGTSESATPESGPGTSTEPSEGSAPGTSTEPSEGSAPGSPAGSPTSTEEGTSTEPSEGSAPGTSTEPSEGSAPGTSESATPESGPGTSTEPSEGSAPGTSESATPESGPGSEPATSGSETPGTSTEPSEGSAPGTSTEPSEGSAPGTSESATPESGPGTSESATPESGPGSPAGSPTSTEEGTSESATPESGPGSEPATSGSETPGTSESATPESGPGTSTEPSEGSAPGTSTEPSEGSAPGTSTEPSEGSAPGTSTEPSEGSAPGTSTEPSEGSAPGTSTEPSEGSAPGSPAGSPTSTEEGTSTEPSEGSAPGTSESATPESGPGSEPATSGSETPGTSESATPESGPGSEPATSGSETPGTSESATPESGPGTSTEPSEGSAPGTSESATPESGPGSPAGSPTSTEEGSPAGSPTSTEEGSPAGSPTSTEEGTSESATPESGPGTSTEPSEGSAPQSPRSFQKKTRHYFIAAVERLWDYGMSSSPHVLRNRAQSGSVPQFKKVVFQEFTDGSFTQPLYRGELNEHLGLLGPYIRAEVEDNIMVTFRNQASRPYSFYSSLISYEEDQRQGAEPRKNFVKPNETKTYFWKVQHHMAPTKDEFDCKAWAYFSDVDLEKDVHSGLIGPLLVCHTNTLNPAHGRQVTVQEFALFFTIFDETKSWYFTENMERNCRAPCNIQMEDPTFKENYRFHAINGYIMDTLPGLVMAQDQRIRWYLLSMGSNENIHSIHFSGHVFTVRKKEEYKMALYNLYPGVFETVEMLPSKAGIWRVECLIGEHLHAGMSTLFLVYSNKCQTPLGMASGHIRDFQITASGQYGQWAPKLARLHYSGSINAWSTKEPFSWIKVDLLAPMIIHGIKTQGARQKFSSLYISQFIIMYSLDGKKWQTYRGNSTGTLMVFFGNVDSSGIKHNIFNPPIIARYIRLHPTHYSIRSTLRMELMGCDLNSCSMPLGMESKAISDAQITASSYFTNMFATWSPSKARLHLQGRSNAWRPQVNNPKEWLQVDFQKTMKVTGVTTQGVKSLLTSMYVKEFLISSSQDGHQWTLFFQNGKVKVFQGNQDSFTPVVNSLDPPLLTRYLRIHPQSWVHQIALRMEVLGCEAQDLYGPEGPSQSPRSFQGTSESATPESGPGSEPATSGSETPGTSESATPESGPGSEPATSGSETPGTSESATPESGPGTSTEPSEGSAPGSPAGSPTSTEEGTSESATPESGPGSEPATSGSETPGTSESATPESGPGSPAGSPTSTEEGSPAGSPTSTEEGTSTEPSEGSAPGTSESATPESGPGTSESATPESGPGTSESATPESGPGSEPATSGSETPGSEPATSGSETPGSPAGSPTSTEEGTSTEPSEGSAPGTSTEPSEGSAPGSEPATSGSETPGTSESATPESGPGTSTEPSEGSAP

SEQ ID NO: 912 - protein, 2576 aa, Artificial Sequence
  Description of Artificial Sequence: Synthetic polypeptide
MQIELSTCFFLCLLRFCFSATRRYYLGAVELSWDYMQSDLGELPVDARFPPRVPKSFPFNTSVVYKKTLFVEFTVHLFNIAKPRPPWMGLLGPTIQAEVYDTVVITLKNMASHPVSLHAVGVSYWKASEGAEYDDQTSQREKEDDKVFPGGSHTYVWQVLKENGPMASDPLCLTYSYLSHVDLVKDLNSGLIGALLVCREGSLAKEKTQTLHKFILLFAVFDEGKSWHSETKNSLMQDRDAASARAWPKMHTVNGYVNRSLPGLIGCHRKSVYWHVIGMGTTPEVHSIFLEGHTFLVRNHRQASLEISPITFLTAQTLLMDLGQFLLFCHISSHQHDGMEAYVKVDSCPEEPQLRMKNNEEAEDYDDDLTDSEMDVVRFDDDNSPSFIQIRSVAKKHPKTWVHYIAAEEEDWDYAPLVLAPDDRSYKSQYLNNGPQRIGRKYKKVRFMAYTDETFKTREAIQHESGILGPLLYGEVGDTLLIIFKNQASRPYNIYPHGITDVRPLYSRRLPKGVKHLKDFPILPGEIFKYKWTVTVEDGPTKSDPRCLTRYYSSFVNMERDLASGLIGPLLICYKESVDQRGNQIMSDKRNVILFSVFDENRSWYLTENIQRFLPNPAGVQLEDPEFQASNIMHSINGYVFDSLQLSVCLHEVAYWYILSIGAQTDFLSVFFSGYTFKHKMVYEDTLTLFPFSGETVFMSMENPGLWILGCHNSDFRNRGMTALLKVSSCDKNTGDYYEDSYEDISAYLLSKNNAIEPRSFSQNGSPAGSPTSTEEGTSESATPESGPGTSTEPSEGSAPGSPAGSPTSTEEGTSTEPSEGSAPGTSTEPSEGSAPGTSESATPESGPGSEPATSGSETPGSEPATSGSETPGSPAGSPTSTEEGTSESATPESGPGTSTEPSEGSAPGTSTEPSEGSAPGSPAGSPTSTEEGTSTEPSEGSAPGTSTEPSEGSAPGTSESATPESGPGTSTEPSEGSAPGTSESATPESGPGSEPATSGSETPGTSTEPSEGSAPGTSTEPSEGSAPGTSESATPESGPGTSESATPESGPGSPAGSPTSTEEGTSESATPESGPGSEPATSGSETPGTSESATPESGPGTSTEPSEGSAPGTSTEPSEGSAPGTSTEPSEGSAPGTSTEPSEGSAPGTSTEPSEGSAPGTSTEPSEGSAPGSPAGSPTSTEEGTSTEPSEGSAPGTSESATPESGPGSEPATSGSETPGTSESATPESGPGSEPATSGSETPGTSESATPESGPGTSTEPSEGSAPGTSESATPESGPGSPAGSPTSTEEGSPAGSPTSTEEGSPAGSPTSTEEGTSESATPESGPGTSTEPSEGSAPQSPRSFQKKTRHYFIAAVERLWDYGMSSSPHVLRNRAQSGSVPQFKKVVFQEFTDGSFTQPLYRGELNEHLGLLGPYIRAEVEDNIMVTFRNQASRPYSFYSSLISYEEDQRQGAEPRKNFVKPNETKTYFWKVQHHMAPTKDEFDCKAWAYFSDVDLEKDVHSGLIGPLLVCHTNTLNPAHGRQVTVQEFALFFTIFDETKSWYFTENMERNCRAPCNIQMEDPTFKENYRFHAINGYIMDTLPGLVMAQDQRIRWYLLSMGSNENIHSIHFSGHVFTVRKKEEYKMALYNLYPGVFETVEMLPSKAGIWRVECLIGEHLHAGMSTLFLVYSNKCQTPLGMASGHIRDFQITASGQYGQWAPKLARLHYSGSINAWSTKEPFSWIKVDLLAPMIIHGIKTQGARQKFSSLYISQFIIMYSLDGKKWQTYRGNSTGTLMVFFGNVDSSGIKHNIFNPPIIARYIRLHPTHYSIRSTLRMELMGCDLNSCSMPLGMESKAISDAQITASSYFTNMFATWSPSKARLHLQGRSNAWRPQVNNPKEWLQVDFQKTMKVTGVTTQGVKSLLTSMYVKEFLISSSQDGHQWTLFFQNGKVKVFQGNQDSFTPVVNSLDPPLLTRYLRIHPQSWVHQIALRMEVLGCEAQDLYGPEGPSQSPRSFQGSPAGSPTSTEEGTSESATPESGPGTSTEPSEGSAPGSPAGSPTSTEEGTSTEPSEGSAPGTSTEPSEGSAPGTSESATPESGPGSEPATSGSETPGSEPATSGSETPGSPAGSPTSTEEGTSESATPESGPGTSTEPSEGSAPGTSTEPSEGSAPGSPAGSPTSTEEGTSTEPSEGSAPGTSTEPSEGSAPGTSESATPESGPGTSTEPSEGSAPGTSESATPESGPGSEPATSGSETPGTSTEPSEGSAPGTSTEPSEGSAPGTSESATPESGPGTSESATPESGPGSPAGSPTSTEEGTSESATPESGPGSEPATSGSETPGTSESATPESGPGTSTEPSEGSAPGTSTEPSEGSAPGTSTEPSEGSAPGTSTEPSEGSAPGTSTEPSEGSAPGTSTEPSEGSAPGSPAGSPTSTEEGTSTEPSEGSAPGTSESATPESGPGSEPATSGSETPGTSESATPESGPGSEPATSGSETPGTSESATPESGPGTSTEPSEGSAPGTSESATPESGPGSPAGSPTSTEEGSPAGSPTSTEEGSPAGSPTSTEEGTSESATPESGPGTSTEPSEGSAP

SEQ ID NO: 913 - protein, 2576 aa, Artificial Sequence [sequence omitted]

SEQ ID NO: 914 - protein, 2871 aa, Artificial Sequence [sequence omitted]

SEQ ID NO: 915 - protein, 2583 aa, Artificial Sequence
  Description of Artificial Sequence: Synthetic polypeptide
MQIELSTCFFLCLLRFCFSPGASPGTSSTGSPGASPGTSSTGSPGTPGSGTASSSPGSSTPSGATGSPGTPGSGTASSSPGSSTPSGATGSPGTPGSGTASSSPGSSTPSGATGSPGSSTPSGATGSPGSSPSASTGTGPGSSPSASTGTGPGASPGTSSTGSPGTPGSGTASSSPGSSTPSGATGSPGSSPSASTGTGPGSSPSASTGTGPGASPGTSSTGSPGASPGTSSTGSPGSSTPSGATGSPGSSPSASTGTGPGASPGTSSTGSPGSSPSASTGTGPGTPGSGTASSSPGSSTPSGATGSIEPRSPSGSPGATRRYYLGAVELSWDYMQSDLGELPVDARFPPRVPKSFPFNTSVVYKKTLFVEFTVHLFNIAKPRPPWMGLLGPTIQAEVYDTVVITLKNMASHPVSLHAVGVSYWKASEGAEYDDQTSQREKEDDKVFPGGSHTYVWQVLKENGPMASDPLCLTYSYLSHVDLVKDLNSGLIGALLVCREGSLAKEKTQTLHKFILLFAVFDEGKSWHSETKNSLMQDRDAASARAWPKMHTVNGYVNRSLPGLIGCHRKSVYWHVIGMGTTPEVHSIFLEGHTFLVRNHRQASLEISPITFLTAQTLLMDLGQFLLFCHISSHQHDGMEAYVKVDSCPEEPQLRMKNNEEAEDYDDDLTDSEMDVVRFDDDNSPSFIQIRSVAKKHPKTWVHYIAAEEEDWDYAPLVLAPDDRSYKSQYLNNGPQRIGRKYKKVRFMAYTDETFKTREAIQHESGILGPLLYGEVGDTLLIIFKNQASRPYNIYPHGITDVRPLYSRRLPKGVKHLKDFPILPGEIFKYKWTVTVEDGPTKSDPRCLTRYYSSFVNMERDLASGLIGPLLICYKESVDQRGNQIMSDKRNVILFSVFDENRSWYLTENIQRFLPNPAGVQLEDPEFQASNIMHSINGYVFDSLQLSVCLHEVAYWYILSIGAQTDFLSVFFSGYTFKHKMVYEDTLTLFPFSGETVFMSMENPGLWILGCHNSDFRNRGMTALLKVSSCDKNTGDYYEDSYEDISAYLLSKNNAIEPRSFSPGTPGSGTASSSPGSSTPSGATGSPGSSPSASTGTGPGSSPSASTGTGPGSSTPSGATGSPGSSTPSGATGSPGASPGTSSTGSPGASPGTSSTGSPGASPGTSSTGSPGTPGSGTASSSPGASPGTSSTGSPGASPGTSSTGSPGASPGTSSTGSPGSSPSASTGTGPGTPGSGTASSSPGASPGTSSTGSPGASPGTSSTGSPGASPGTSSTGSPGSSTPSGATGSPGSSTPSGATGSPGASPGTSSTGSPGTPGSGTASSSPGSSTPSGATGSPGSSTPSGATGSPGSSTPSGATGSPGSSPSASTGTGPGASPGTSSTGSPGASPGTSSTGSPGTPGSGTASSSPGASPGTSSTGSPGASPGTSSTGSPGASPGTSSTGSPGASPGTSSTGSPGTPGSGTASSSPGSSTPSGATGSPGTPGSGTASSSPGSSTPSGATGSPGTPGSGTASSSPGSSTPSGATGSPGSSTPSGATGSPGSSPSASTGTGPGSSPSASTGTGPGASPGTSSTGSPGTPGSGTASSSPGSSTPSGATGSPGSSPSASTGTGPGSSPSASTGTGPGASPGTSSTGSQSPRSFQKKTRHYFIAAVERLWDYGMSSSPHVLRNRAQSGSVPQFKKVVFQEFTDGSFTQPLYRGELNEHLGLLGPYIRAEVEDNIMVTFRNQASRPYSFYSSLISYEEDQRQGAEPRKNFVKPNETKTYFWKVQHHMAPTKDEFDCKAWAYFSDVDLEKDVHSGLIGPLLVCHTNTLNPAHGRQVTVQEFALFFTIFDETKSWYFTENMERNCRAPCNIQMEDPTFKENYRFHAINGYIMDTLPGLVMAQDQRIRWYLLSMGSNENIHSIHFSGHVFTVRKKEEYKMALYNLYPGVFETVEMLPSKAGIWRVECLIGEHLHAGMSTLFLVYSNKCQTPLGMASGHIRDFQITASGQYGQWAPKLARLHYSGSINAWSTKEPFSWIKVDLLAPMIIHGIKTQGARQKFSSLYISQFIIMYSLDGKKWQTYRGNSTGTLMVFFGNVDSSGIKHNIFNPPIIARYIRLHPTHYSIRSTLRMELMGCDLNSCSMPLGMESKAISDAQITASSYFTNMFATWSPSKARLHLQGRSNAWRPQVNNPKEWLQVDFQKTMKVTGVTTQGVKSLLTSMYVKEFLISSSQDGHQWTLFFQNGKVKVFQGNQDSFTPVVNSLDPPLLTRYLRIHPQSWVHQIALRMEVLGCEAQDLYGSPGQSPRSFQPGASPGTSSTGSPGASPGTSSTGSPGTPGSGTASSSPGSSTPSGATGSPGTPGSGTASSSPGSSTPSGATGSPGTPGSGTASSSPGSSTPSGATGSPGSSTPSGATGSPGSSPSASTGTGPGSSPSASTGTGPGASPGTSSTGSPGTPGSGTASSSPGSSTPSGATGSPGSSPSASTGTGPGSSPSASTGTGPGASPGTSSTGSPGASPGTSSTGSPGSSTPSGATGSPGSSPSASTGTGPGASPGTSSTGSPGSSPSASTGTGPGTPGSGTASSSPGSSTPSGATGS

SEQ ID NO: 916 - protein, 2873 aa, Artificial Sequence [sequence omitted]

SEQ ID NO: 917 - protein, 2572 aa, Artificial Sequence
  Description of Artificial Sequence: Synthetic polypeptide
MQIELSTCFFLCLLRFCFSATRRYYLGAVELSWDYMQSDLGELPVDARFPPRVPKSFPFNTSVVYKKTLFVEFTVHLFNIAKPRPPWMGLLGPTIQAEVYDTVVITLKNMASHPVSLHAVGVSYWKASEGAEYDDQTSQREKEDDKVFPGGSHTYVWQVLKENGPMASDPLCLTYSYLSHVDLVKDLNSGLIGALLVCREGSLAKEKTQTLHKFILLFAVFDEGKSWHSETKNSLMQDRDAASARAWPKMHTVNGYVNRSLPGLIGCHRKSVYWHVIGMGTTPEVHSIFLEGHTFLVRNHRQASLEISPITFLTAQTLLMDLGQFLLFCHISSHQHDGMEAYVKVDSCPEEPQLRMKNNEEAEDYDDDLTDSEMDVVRFDDDNSPSFIQIRSVAKKHPKTWVHYIAAEEEDWDYAPLVLAPDDRSYKSQYLNNGPQRIGRKYKKVRFMAYTDETFKTREAIQHESGILGPLLYGEVGDTLLIIFKNQASRPYNIYPHGITDVRPLYSRRLPKGVKHLKDFPILPGEIFKYKWTVTVEDGPTKSDPRCLTRYYSSFVNMERDLASGLIGPLLICYKESVDQRGNQIMSDKRNVILFSVFDENRSWYLTENIQRFLPNPAGVQLEDPEFQASNIMHSINGYVFDSLQLSVCLHEVAYWYILSIGAQTDFLSVFFSGYTFKHKMVYEDTLTLFPFSGETVFMSMENPGLWILGCHNSDFRNRGMTALLKVSSCDKNTGDYYEDSYEDISAYLLSKNNAIEPRSFSPGTPGSGTASSSPGSSTPSGATGSPGSSPSASTGTGPGSSPSASTGTGPGSSTPSGATGSPGSSTPSGATGSPGASPGTSSTGSPGASPGTSSTGSPGASPGTSSTGSPGTPGSGTASSSPGASPGTSSTGSPGASPGTSSTGSPGASPGTSSTGSPGSSPSASTGTGPGTPGSGTASSSPGASPGTSSTGSPGASPGTSSTGSPGASPGTSSTGSPGSSTPSGATGSPGSSTPSGATGSPGASPGTSSTGSPGTPGSGTASSSPGSSTPSGATGSPGSSTPSGATGSPGSSTPSGATGSPGSSPSASTGTGPGASPGTSSTGSPGASPGTSSTGSPGTPGSGTASSSPGASPGTSSTGSPGASPGTSSTGSPGASPGTSSTGSPGASPGTSSTGSPGTPGSGTASSSPGSSTPSGATGSPGTPGSGTASSSPGSSTPSGATGSPGTPGSGTASSSPGSSTPSGATGSPGSSTPSGATGSPGSSPSASTGTGPGSSPSASTGTGPGASPGTSSTGSPGTPGSGTASSSPGSSTPSGATGSPGSSPSASTGTGPGSSPSASTGTGPGASPGTSSTGSQSPRSFQKKTRHYFIAAVERLWDYGMSSSPHVLRNRAQSGSVPQFKKVVFQEFTDGSFTQPLYRGELNEHLGLLGPYIRAEVEDNIMVTFRNQASRPYSFYSSLISYEEDQRQGAEPRKNFVKPNETKTYFWKVQHHMAPTKDEFDCKAWAYFSDVDLEKDVHSGLIGPLLVCHTNTLNPAHGRQVTVQEFALFFTIFDETKSWYFTENMERNCRAPCNIQMEDPTFKENYRFHAINGYIMDTLPGLVMAQDQRIRWYLLSMGSNENIHSIHFSGHVFTVRKKEEYKMALYNLYPGVFETVEMLPSKAGIWRVECLIGEHLHAGMSTLFLVYSNKCQTPLGMASGHIRDFQITASGQYGQWAPKLARLHYSGSINAWSTKEPFSWIKVDLLAPMIIHGIKTQGARQKFSSLYISQFIIMYSLDGKKWQTYRGNSTGTLMVFFGNVDSSGIKHNIFNPPIIARYIRLHPTHYSIRSTLRMELMGCDLNSCSMPLGMESKAISDAQITASSYFTNMFATWSPSKARLHLQGRSNAWRPQVNNPKEWLQVDFQKTMKVTGVTTQGVKSLLTSMYVKEFLISSSQDGHQWTLFFQNGKVKVFQGNQDSFTPVVNSLDPPLLTRYLRIHPQSWVHQIALRMEVLGCEAQDLYGSPGQSPRSFQPGTPGSGTASSSPGSSTPSGATGSPGSSPSASTGTGPGSSPSASTGTGPGSSTPSGATGSPGSSTPSGATGSPGASPGTSSTGSPGASPGTSSTGSPGASPGTSSTGSPGTPGSGTASSSPGASPGTSSTGSPGASPGTSSTGSPGASPGTSSTGSPGSSPSASTGTGPGTPGSGTASSSPGASPGTSSTGSPGASPGTSSTGSPGASPGTSSTGSPGSSTPSGATGSPGSSTPSGATGSPGASPGTSSTGSPGTPGSGTASSSPGSSTPSGATGSPGSSTPSGATGSPGSSTPSGATGSPGSSPSASTGTGPGASPGTSSTGSPGASPGTSSTGSPGTPGSGTASSSPGASPGTSSTGSPGASPGTSSTGSPGASPGTSSTGSPGASPGTSSTGSPGTPGSGTASSSPGSSTPSGATGSPGTPGSGTASSSPGSSTPSGATGSPGTPGSGTASSSPGSSTPSGATGSPGSSTPSGATGSPGSSPSASTGTGPGSSPSASTGTGPGASPGTSSTGSPGTPGSGTASSSPGSSTPSGATGSPGSSPSASTGTGPGSSPSASTGTGPGASPGTSSTGS

SEQ ID NO: 918 - protein, 2297 aa, Artificial Sequence
  Description of Artificial Sequence: Synthetic polypeptide
MQIELSTCFFLCLLRFCFSPGASPGTSSTGSPGASPGTSSTGSPGTPGSGTASSSPGSSTPSGATGSPGTPGSGTASSSPGSSTPSGATGSPGTPGSGTASSSPGSSTPSGATGSPGSSTPSGATGSPGSSPSASTGTGPGSSPSASTGTGPGASPGTSSTGSPGTPGSGTASSSPGSSTPSGATGSPGSSPSASTGTGPGSSPSASTGTGPGASPGTSSTGSPGASPGTSSTGSPGSSTPSGATGSPGSSPSASTGTGPGASPGTSSTGSPGSSPSASTGTGPGTPGSGTASSSPGSSTPSGATGSQSPRSFQGPSGPATRRYYLGAVELSWDYMQSDLGELPVDARFPPRVPKSFPFNTSVVYKKTLFVEFTVHLFNIAKPRPPWMGLLGPTIQAEVYDTVVITLKNMASHPVSLHAVGVSYWKASEGAEYDDQTSQREKEDDKVFPGGSHTYVWQVLKENGPMASDPLCLTYSYLSHVDLVKDLNSGLIGALLVCREGSLAKEKTQTLHKFILLFAVFDEGKSWHSETKNSLMQDRDAASARAWPKMHTVNGYVNRSLPGLIGCHRKSVYWHVIGMGTTPEVHSIFLEGHTFLVRNHRQASLEISPITFLTAQTLLMDLGQFLLFCHISSHQHDGMEAYVKVDSCPEEPQLRMKNNEEAEDYDDDLTDSEMDVVRFDDDNSPSFIQIRSVAKKHPKTWVHYIAAEEEDWDYAPLVLAPDDRSYKSQYLNNGPQRIGRKYKKVRFMAYTDETFKTREAIQHESGILGPLLYGEVGDTLLIIFKNQASRPYNIYPHGITDVRPLYSRRLPKGVKHLKDFPILPGEIFKYKWTVTVEDGPTKSDPRCLTRYYSSFVNMERDLASGLIGPLLICYKESVDQRGNQIMSDKRNVILFSVFDENRSWYLTENIQRFLPNPAGVQLEDPEFQASNIMHSINGYVFDSLQLSVCLHEVAYWYILSIGAQTDFLSVFFSGYTFKHKMVYEDTLTLFPFSGETVFMSMENPGLWILGCHNSDFRNRGMTALLKVSSCDKNTGDYYEDSYEDISAYLLSKNNAIEPRSFSPGASPGTSSTGSPGASPGTSSTGSPGTPGSGTASSSPGSSTPSGATGSPGTPGSGTASSSPGSSTPSGATGSPGTPGSGTASSSPGSSTPSGATGSPGSSTPSGATGSPGSSPSASTGTGPGSSPSASTGTGPGASPGTSSTGSPGTPGSGTASSSPGSSTPSGATGSPGSSPSASTGTGPGSSPSASTGTGPGASPGTSSTGSPGASPGTSSTGSPGSSTPSGATGSPGSSPSASTGTGPGASPGTSSTGSPGSSPSASTGTGPGTPGSGTASSSPGSSTPSGATGSQSPRSFQKKTRHYFIAAVERLWDYGMSSSPHVLRNRAQSGSVPQFKKVVFQEFTDGSFTQPLYRGELNEHLGLLGPYIRAEVEDNIMVTFRNQASRPYSFYSSLISYEEDQRQGAEPRKNFVKPNETKTYFWKVQHHMAPTKDEFDCKAWAYFSDVDLEKDVHSGLIGPLLVCHTNTLNPAHGRQVTVQEFALFFTIFDETKSWYFTENMERNCRAPCNIQMEDPTFKENYRFHAINGYIMDTLPGLVMAQDQRIRWYLLSMGSNENIHSIHFSGHVFTVRKKEEYKMALYNLYPGVFETVEMLPSKAGIWRVECLIGEHLHAGMSTLFLVYSNKCQTPLGMASGHIRDFQITASGQYGQWAPKLARLHYSGSINAWSTKEPFSWIKVDLLAPMIIHGIKTQGARQKFSSLYISQFIIMYSLDGKKWQTYRGNSTGTLMVFFGNVDSSGIKHNIFNPPIIARYIRLHPTHYSIRSTLRMELMGCDLNSCSMPLGMESKAISDAQITASSYFTNMFATWSPSKARLHLQGRSNAWRPQVNNPKEWLQVDFQKTMKVTGVTTQGVKSLLTSMYVKEFLISSSQDGHQWTLFFQNGKVKVFQGNQDSFTPVVNSLDPPLLTRYLRIHPQSWVHQIALRMEVLGCEAQDLYGPSGPQSPRSFQGTSESATPESGPGSEPATSGSETPGTSESATPESGPGSEPATSGSETPGTSESATPESGPGTSTEPSEGSAPGSPAGSPTSTEEGTSESATPESGPGSEPATSGSETPGTSESATPESGPGSPAGSPTSTEEGSPAGSPTSTEEGTSTEPSEGSAPGTSESATPESGPGTSESATPESGPGTSESATPESGPGSEPATSGSETPGSEPATSGSETPGSPAGSPTSTEEGTSTEPSEGSAPGTSTEPSEGSAPGSEPATSGSETPGTSESATPESGPGTSTEPSEGSAP

SEQ ID NO: 919 - protein, 2572 aa, Artificial Sequence
  Description of Artificial Sequence: Synthetic polypeptide
MQIELSTCFFLCLLRFCFSGSPAGSPTSTEEGTSESATPESGPGTSTEPSEGSAPGSPAGSPTSTEEGTSTEPSEGSAPGTSTEPSEGSAPGTSESATPESGPGSEPATSGSETPGSEPATSGSETPGSPAGSPTSTEEGTSESATPESGPGTSTEPSEGSAPGTSTEPSEGSAPGSPAGSPTSTEEGTSTEPSEGSAPGTSTEPSEGSAPGTSESATPESGPGTSTEPSEGSAPGTSESATPESGPGSEPATSGSETPGTSTEPSEGSAPGTSTEPSEGSAPGTSESATPESGPGTSESATPESGPGSPAGSPTSTEEGTSESATPESGPGSEPATSGSETPGTSESATPESGPGTSTEPSEGSAPGTSTEPSEGSAPGTSTEPSEGSAPGTSTEPSEGSAPGTSTEPSEGSAPGTSTEPSEGSAPGSPAGSPTSTEEGTSTEPSEGSAPGTSESATPESGPGSEPATSGSETPGTSESATPESGPGSEPATSGSETPGTSESATPESGPGTSTEPSEGSAPGTSESATPESGPGSPAGSPTSTEEGSPAGSPTSTEEGSPAGSPTSTEEGTSESATPESGPGTSTEPSEGSAPQSPRSFQGSPGATRRYYLGAVELSWDYMQSDLGELPVDARFPPRVPKSFPFNTSVVYKKTLFVEFTVHLFNIAKPRPPWMGLLGPTIQAEVYDTVVITLKNMASHPVSLHAVGVSYWKASEGAEYDDQTSQREKEDDKVFPGGSHTYVWQVLKENGPMASDPLCLTYSYLSHVDLVKDLNSGLIGALLVCREGSLAKEKTQTLHKFILLFAVFDEGKSWHSETKNSLMQDRDAASARAWPKMHTVNGYVNRSLPGLIGCHRKSVYWHVIGMGTTPEVHSIFLEGHTFLVRNHRQASLEISPITFLTAQTLLMDLGQFLLFCHISSHQHDGMEAYVKVDSCPEEPQLRMKNNEEAEDYDDDLTDSEMDVVRFDDDNSPSFIQIRSVAKKHPKTWVHYIAAEEEDWDYAPLVLAPDDRSYKSQYLNNGPQRIGRKYKKVRFMAYTDETFKTREAIQHESGILGPLLYGEVGDTLLIIFKNQASRPYNIYPHGITDVRPLYSRRLPKGVKHLKDFPILPGEIFKYKWTVTVEDGPTKSDPRCLTRYYSSFVNMERDLASGLIGPLLICYKESVDQRGNQIMSDKRNVILFSVFDENRSWYLTENIQRFLPNPAGVQLEDPEFQASNIMHSINGYVFDSLQLSVCLHEVAYWYILSIGAQTDFLSVFFSGYTFKHKMVYEDTLTLFPFSGETVFMSMENPGLWILGCHNSDFRNRGMTALLKVSSCDKNTGDYYEDSYEDISAYLLSKNNAIEPRSFSPGTPGSGTASSSPGSSTPSGATGSPGSSPSASTGTGPGSSPSASTGTGPGSSTPSGATGSPGSSTPSGATGSPGASPGTSSTGSPGASPGTSSTGSPGASPGTSSTGSPGTPGSGTASSSPGASPGTSSTGSPGASPGTSSTGSPGASPGTSSTGSPGSSPSASTGTGPGTPGSGTASSSPGASPGTSSTGSPGASPGTSSTGSPGASPGTSSTGSPGSSTPSGATGSPGSSTPSGATGSPGASPGTSSTGSPGTPGSGTASSSPGSSTPSGATGSPGSSTPSGATGSPGSSTPSGATGSPGSSPSASTGTGPGASPGTSSTGSPGASPGTSSTGSPGTPGSGTASSSPGASPGTSSTGSPGASPGTSSTGSPGASPGTSSTGSPGASPGTSSTGSPGTPGSGTASSSPGSSTPSGATGSPGTPGSGTASSSPGSSTPSGATGSPGTPGSGTASSSPGSSTPSGATGSPGSSTPSGATGSPGSSPSASTGTGPGSSPSASTGTGPGASPGTSSTGSPGTPGSGTASSSPGSSTPSGATGSPGSSPSASTGTGPGSSPSASTGTGPGASPGTSSTGSQSPRSFQKKTRHYFIAAVERLWDYGMSSSPHVLRNRAQSGSVPQFKKVVFQEFTDGSFTQPLYRGELNEHLGLLGPYIRAEVEDNIMVTFRNQASRPYSFYSSLISYEEDQRQGAEPRKNFVKPNETKTYFWKVQHHMAPTKDEFDCKAWAYFSDVDLEKDVHSGLIGPLLVCHTNTLNPAHGRQVTVQEFALFFTIFDETKSWYFTENMERNCRAPCNIQMEDPTFKENYRFHAINGYIMDTLPGLVMAQDQRIRWYLLSMGSNENIHSIHFSGHVFTVRKKEEYKMALYNLYPGVFETVEMLPSKAGIWRVECLIGEHLHAGMSTLFLVYSNKCQTPLGMASGHIRDFQITASGQYGQWAPKLARLHYSGSINAWSTKEPFSWIKVDLLAPMIIHGIKTQGARQKFSSLYISQFIIMYSLDGKKWQTYRGNSTGTLMVFFGNVDSSGIKHNIFNPPIIARYIRLHPTHYSIRSTLRMELMGCDLNSCSMPLGMESKAISDAQITASSYFTNMFATWSPSKARLHLQGRSNAWRPQVNNPKEWLQVDFQKTMKVTGVTTQGVKSLLTSMYVKEFLISSSQDGHQWTLFFQNGKVKVFQGNQDSFTPVVNSLDPPLLTRYLRIHPQSWVHQIALRMEVLGCEAQDLY

SEQ ID NO: 920 - protein, 2360 aa, Artificial Sequence
  Description of Artificial Sequence: Synthetic polypeptide
ATRRYYLGAVELSWDYMQSDLGELPVDARFPPRVPKSFPFNTSVVYKKTLFVEFTVHLFNIAKPRPPWMGLLGPTIQAEVYDTVVITLKNMASHPVSLHAVGVSYWKASEGAEYDDQTSQREKEDDKVFPGGSHTYVWQVLKENGPMASDPLCLTYSYLSHVDLVKDLNSGLIGALLVCREGSLAKEKTQTLHKFILLFAVFDEGKSWHSETKNSLMQDRDAASARAWPKMHTVNGYVNSSLPGLIGCHRKSVYWHVIGMGTTPEVHSIFLEGHTFLVRNHRQASLEISPITFLTAQTLLMDLGQFLLFCHISSHQHDGMEAYVKVDSCPEEPQLRMKNNEEAEDYDDDLTDSEMDVVRFDDDNSPSKLTRAETGEPSEGSAPGSPAGSPTSTEEGTSESATPESGPGSEPATSGSGFIQIRSVAKKHPKTWVHYIAAEEEDWDYAPLVLAPDDRSYKSQYLNNGPQRIGRKYKKVRFMAYTDETFKTREAIQHESGILGPLLYGEVGDTLLIIFKNQASRPYNIYPHGITDVRPLYSRRLPKGVKHLKDFPILPGEIFKYKWTVTVEDGPTKSDPRCLTRYYSSFVNMERDLASGLIGPLLICYKESVDQRGNQIMSDKRNVILFSVFDENRSWYLTENIQRFLPNPAGVQLEDPEFQASNIMHSINGYVFDSLQLSVCLHEVAYWYILSIGAQTDFLSVFFSGYTFKHKMVYEDTLTLFPFSGETVFMSMENPGLWILGCHNSDFRNRGMTALLKVSSCDKNTGDYYEDSYEDISAYLLSKNNAIEPRSFSQNPPVLKRHQREITRTTLQSDQEEIDYDDTISVEMKKEDFDIYDEDENQSPRSFQKKTRHYFIAAVERLWDYGMSSSPHVLRNRAQSGSVPQFKKVVFQEFTDGSFTQPLYRGELNEHLGLLGPYIRAEVEDNIMVTFRNQASRPYSFYSSLISYEEDQRQGAEPRKNFVKPNETKTYFWKVQHHMAPTKDEFDCKAWAYFSDVDLEKDVHSGLIGPLLVCHTNTLNPAHGRQVTVQEFALFFTIFDETKSWYFTENMERNCRAPCNIQMEDPTFKENYRFHAINGYIMDTLPGLVMAQDQRIRWYLLSMGSNENIHSIHFSGHVFTVRKKEEYKMALYNLYPGVFETVEMLPSKAGIWRVECLIGEHLHAGMSTLFLVYSNKCQTPLGMASGHIRDFQITASGQYGQWAPKLARLHYSGSINAWSTKEPFSWIKVDLLAPMIIHGIKTQGARQKFSSLYISQFIIMYSLDGKKWQTYRGNSTGTLMVFFGNVDSSGIKHNIFNPPIIARYIRLHPTHYSIRSTLRMELMGCDLNSCSMPLGMESKAISDAQITASSYFTNMFATWTPSKARLHLQGRSNAWRPQVNNPKEWLQVDFQKTMKVTGVTTQGVKSLLTSMYVKEFLISSSQDGHQWTLFFQNGKVKVFQGNQDSFTPVVNSLDPPLLTRYLRIHPQSWVHQIALRMEVLGCEAQDLYKLTRAETGGSPAGSPTSTEEGTSESATPESGPGTSTEPSEGSAPGSPAGSPTSTEEGTSTEPSEGSAPGTSTEPSEGSAPGTSESATPESGPGSEPATSGSETPGSEPATSGSETPGSPAGSPTSTEEGTSESATPESGPGTSTEPSEGSAPGTSTEPSEGSAPGSPAGSPTSTEEGTSTEPSEGSAPGTSTEPSEGSAPGTSESATPESGPGTSTEPSEGSAPGTSESATPESGPGSEPATSGSETPGTSTEPSEGSAPGTSTEPSEGSAPGTSESATPESGPGTSESATPESGPGSPAGSPTSTEEGTSESATPESGPGSEPATSGSETPGTSESATPESGPGTSTEPSEGSAPGTSTEPSEGSAPGTSTEPSEGSAPGTSTEPSEGSAPGTSTEPSEGSAPGTSTEPSEGSAPGSPAGSPTSTEEGTSTEPSEGSAPGTSESATPESGPGSEPATSGSETPGTSESATPESGPGSEPATSGSETPGTSESATPESGPGTSTEPSEGSAPGTSESATPESGPGSPAGSPTSTEEGSPAGSPTSTEEGSPAGSPTSTEEGTSESATPESGPGTSTEPSEGSAPGTSESATPESGPGSEPATSGSETPGTSESATPESGPGSEPATSGSETPGTSESATPESGPGTSTEPSEGSAPGSPAGSPTSTEEGTSESATPESGPGSEPATSGSETPGTSESATPESGPGSPAGSPTSTEEGSPAGSPTSTEEGTSTEPSEGSAPGTSESATPESGPGTSESATPESGPGTSESATPESGPGSEPATSGSETPGSEPATSGSETPGSPAGSPTSTEEGTSTEPSEGSAPGTSTEPSEGSAPGSEPATSGSETPGTSESATPESGPGTSTEPSEGSAP

SEQ ID NO: 921 - protein, 2615 aa, Artificial Sequence
  Description of Artificial Sequence: Synthetic polypeptide
ATRRYYLGAVELSWDYMQSDLGELPVDARFPPRVPKSFPFNTSVVYKKTLFVEFTVHLFNIAKPRPPWMGLLGPTIQAEVYDTVVITLKNMASHPVSLHAVGVSYWKASEGAEYDDQTSQREKEDDKVFPGGSHTYVWQVLKENGPMASDPLCLTYSYLSHVDLVKDLNSGLIGALLVCREGSLAKEKTQTLHKFILLFAVFDEGKSWHSETKNSLMQDRDAASARAWPKMHTVNGYVNRSLPGLIGCHRKSVYWHVIGMGTTPEVHSIFLEGHTFLVRNHRQASLEISPITFLTAQTLLMDLGQFLLFCHISSHQHDGMEAYVKVDSCPEEPQLRMKNNEEAEDYDDDLTDSEMDVVRFDDDNSPSFIQIRSVAKKHPKTWVHYIAAEEEDWDYAPLVLAPDDRSYKSQYLNNGPQRIGRKYKKVRFMAYTDETFKTREAIQHESGILGPLLYGEVGDTLLIIFKNQASRPYNIYPHGITDVRPLYSRRLPKGVKHLKDFPILPGEIFKYKWTVTVEDGPTKSDPRCLTRYYSSFVNMERDLASGLIGPLLICYKESVDQRGNQIMSDKRNVILFSVFDENRSWYLTENIQRFLPNPAGVQLEDPEFQASNIMHSINGYVFDSLQLSVCLHEVAYWYILSIGAQTDFLSVFFSGYTFKHKMVYEDTLTLFPFSGETVFMSMENPGLWILGCHNSDFRNRGMTALLKVSSCDKNTGDYYEDSYEDISAYLLSKNNAIEPRSFSQNPLGRIVGGPGASPGTSSTGSPGASPGTSSTGSPGTPGSGTASSSPGSSTPSGATGSPGTPGSGTASSSPGSSTPSGATGSPGTPGSGTASSSPGSSTPSGATGSPGSSTPSGATGSPGSSPSASTGTGPGSSPSASTGTGPGASPGTSSTGSPGTPGSGTASSSPGSSTPSGATGSPGSSPSASTGTGPGSSPSASTGTGPGASPGTSSTGSPGASPGTSSTGSPGSSTPSGATGSPGSSPSASTGTGPGASPGTSSTGSPGSSPSASTGTGPGTPGSGTASSSPGSSTPSGATGSGPLGRIVGGPPVLKRHQREITRTTLQSDQEEIDYDDTISVEMKKEDFDIYDEDENQSPRSFQKKTRHYFIAAVERLWDYGMSSSPHVLRNRAQSGSVPQFKKVVFQEFTDGSFTQPLYRGELNEHLGLLGPYIRAEVEDNIMVTFRNQASRPYSFYSSLISYEEDQRQGAEPRKNFVKPNETKTYFWKVQHHMAPTKDEFDCKAWAYFSDVDLEKDVHSGLIGPLLVCHTNTLNPAHGRQVTVQEFALFFTIFDETKSWYFTENMERNCRAPCNIQMEDPTFKENYRFHAINGYIMDTLPGLVMAQDQRIRWYLLSMGSNENIHSIHFSGHVFTVRKKEEYKMALYNLYPGVFETVEMLPSKAGIWRVECLIGEHLHAGMSTLFLVYSNKCQTPLGMASGHIRDFQITASGQYGQWAPKLARLHYSGSINAWSTKEPFSWIKVDLLAPMIIHGIKTQGARQKFSSLYISQFIIMYSLDGKKWQTYRGNSTGTLMVFFGNVDSSGIKHNIFNPPIIARYIRLHPTHYSIRSTLRMELMGCDLNSCSMPLGMESKAISDAQITASSYFTNMFATWSPSKARLHLQGRSNAWRPQVNNPKEWLQVDFQKTMKVTGVTTQGVKSLLTSMYVKEFLISSSQDGHQWTLFFQNGKVKVFQGNQDSFTPVVNSLDPPLLTRYLRIHPQSWVHQIALRMEVLGCEAQDLYPLGRIVGGGASPGTSSTGSPGSSPSASTGTGPGSSPSASTGTGPGTPGSGTASSSPGSSTPSGATGSPGSSPSASTGTGPGASPGTSSTGSPGTPGSGTASSSPGSSTPSGATGSPGTPGSGTASSSPGASPGTSSTGSPGASPGTSSTGSPGTPGSGTASSSPGSSTPSGATGSPGASPGTSSTGSPGTPGSGTASSSPGSSTPSGATGSPGSSPSASTGTGPGSSPSASTGTGPGSSTPSGATGSPGSSTPSGATGSPGASPGTSSTGSPGASPGTSSTGSPGASPGTSSTGSPGTPGSGTASSSPGASPGTSSTGSPGASPGTSSTGSPGASPGTSSTGSPGSSPSASTGTGPGTPGSGTASSSPGASPGTSSTGSPGASPGTSSTGSPGASPGTSSTGSPGSSTPSGATGSPGSSTPSGATGSPGASPGTSSTGSPGTPGSGTASSSPGSSTPSGATGSPGSSTPSGATGSPGSSTPSGATGSPGSSPSASTGTGPGASPGTSSTGSPGASPGTSSTGSPGTPGSGTASSSPGASPGTSSTGSPGASPGTSSTGSPGASPGTSSTGSPGASPGTSSTGSPGTPGSGTASSSPGSSTPSGATGSPGTPGSGTASSSPGSSTPSGATGSPGTPGSGTASSSPGSSTPSGATGSPGSSTPSGATGSPGSSPSASTGTGPGSSPSASTGTGPGASPGTSSTGSPGTPGSGTASSSPGSSTPSGATGSPGSSPSASTGTGPGSSPSASTGTGPGASPGTSSTGSPGASPGTSSTGSPGSSTPSGATGSPGSSPSASTGTGPGASPGTSSTGSPGSSPSASTGTGPGTPGSGTASSSPGSSTPSGATGSPGSSTPSGATGSPGASPGTSSTGSP

SEQ ID NO: 922 - protein, 2242 aa, Artificial Sequence
  Description of Artificial Sequence: Synthetic polypeptide
ATRRYYLGAVELSWDYMQSDLGELPVDARFPPRVPKSFPFNTSVVYKKTLFVEFTVHLFNIAKPRPPWMGLLGPTIQAEVYDTVVITLKNMASHPVSLHAVGVSYWKASEGAEYDDQTSQREKEDDKVLQVRIVGGGAPSPSASTGTGPGTPGSGTASSSPGSSTPSGATGSPGPSGPGLQVRIVGGFPGGSHTYVWQVLKENGPMASDPLCLTYSYLSHVDLVKDLNSGLIGALLVCREGSLAKEKTQTLHKFILLFAVFDEGKSWHSETKNSLMQDRDAASARAWPKMHTVNGYVNRSLPGLIGCHRKSVYWHVIGMGTTPEVHSIFLEGHTFLVRNHRQASLEISPITFLTAQTLLMDLGQFLLFCHISSHQHDGMEAYVKVDSCPEEPQLRMKNNEEAEDYDDDLTDSEMDVVRFDDDNSPSFIQIRSVAKKHPKTWVHYIAAEEEDWDYAPLVLAPDDRSYKSQYLNNGPQRIGRKYKKVRFMAYTDETFKTREAIQHESGILGPLLYGEVGDTLLIIFKNQASRPYNIYPHGITDVRPLYSRRLPKGVKHLKDFPILPGEIFKYKWTVTVEDGPTKSDPRCLTRYYSSFVNMERDLASGLIGPLLICYKESVDQRGNQIMSDKRNVILFSVFDENRSWYLTENIQRFLPNPAGVQLEDPEFQASNIMHSINGYVFDSLQLSVCLHEVAYWYILSIGAQTDFLSVFFSGYTFKHKMVYEDTLTLFPFSGETVFMSMENPGLWILGCHNSDFRNRGMTALLKVSSCDKNTGDYYEDSYEDISAYLLSKNNAIEPRSFSQNPPVLKRHQREITRTTLQSDQEEIDYDDTISVEMKKEDFDIYDEDENQSPRSFQKKTRHYFIAAVERLWDYGMSSSPHVLRNRAQSGSVPQFKKVVFQEFTDGSFTQPLYRGELNEHLGLLGPYIRAEVEDNIMVTFRNQASRPYSFYSSLISYEEDQRQGAEPRKNFVKPNETKTYFWKVQHHMAPTKDEFDCKAWAYFSDVDLEKDVHSGLIGPLLVCHTNTLNPAHGRQVTVQEFALFFTIFDETKSWYFTENMERNCRAPCNIQMEDPTFKENYRFHAINGYIMDTLPGLVMAQDQRIRWYLLSMGSNENIHSIHFSGHVFTVRKKEEYKMALYNLYPGVFETVEMLPSKAGIWRVECLIGEHLHAGMSTLFLVYSNKCQTPLGMASGHIRDFQITASGQYGLQVRIVGGSGTASSSPGSSTPSGATGSPGTPGSGTASSSPGSSTPSGATGSPGSSTPSGATGSPGSSPSASTGTGPGSSPSASTGTGPGASPGTSSTGSPGTPGSGTASSSPGSSTPSGATGSPGSSPSASTGTGPGSSPSASTGTGPGASPGLQVRIVGGQWAPKLARLHYSGSINAWSTKEPFSWIKVDLLAPMIIHGIKTQGARQKFSSLYISQFIIMYSLDGKKWQTYRGNSTGTLMVFFGNVDSSGIKHNIFNPPIIARYIRLHPTHYSIRSTLRMELMGCDLNSCSMPLGMESKAISDAQITASSYFTNMFATWSPSKARLHLQGRSNAWRPQVNNPKEWLQVDFQKTMKVTGVTTQGVKSLLTSMYVKEFLISSSQDGHQWTLFFQNGKVKVFQGNQDSFTPVVNSLDPPLLTRYLRIHPQSWVHQIALRMEVLGCEAQDLYLQVRIVGGPGTPGSGTASSSPGSSTPSGATGSPGSSPSASTGTGPGSSPSASTGTGPGSSTPSGATGSPGSSTPSGATGSPGASPGTSSTGSPGASPGTSSTGSPGASPGTSSTGSPGTPGSGTASSSPGASPGTSSTGSPGASPGTSSTGSPGASPGTSSTGSPGSSPSASTGTGPGTPGSGTASSSPGASPGTSSTGSPGASPGTSSTGSPGASPGTSSTGSPGSSTPSGATGSPGSSTPSGATGSPGASPGTSSTGSPGTPGSGTASSSPGSSTPSGATGSPGSSTPSGATGSPGSSTPSGATGSPGSSPSASTGTGPGASPGTSSTGSPGASPGTSSTGSPGTPGSGTASSSPGASPGTSSTGSPGASPGTSSTGSPGASPGTSSTGSPGASPGTSSTGSPGTPGSGTASSSPGSSTPSGATGSPGTPGSGTASSSPGSSTPSGATGSPGTPGSGTASSSPGSSTPSGATGSPGSSTPSGATGSPGSSPSASTGTGPGSSPSASTGTGPGASPGTSSTGSPGTPGSGTASSSPGSSTPSGATGSPGSSPSASTGTGPGSSPSASTGTGPGASPGTSSTGS

SEQ ID NO: 923 - protein, 3351 aa, Artificial Sequence [sequence omitted]

SEQ ID NO: 924 - protein, 1592 aa, Artificial Sequence
  Description of Artificial Sequence: Synthetic polypeptide
ATRRYYLGAVELSWDYMQSDLGELPVDARFPPRVPKSFPFNTSVVYKKTLFVEFTVHLFNIAKPRPPWMGLLGPTIQAEVYDTVVITLKNMASHPVSLHAVGVSYWKASEGAEYDDQTSQREKEDDKVFPGGSHTYVWQVLKENGPMASDPLCLTYSYLSHVDLVKDLNSGLIGALLVCREGSLAKEKTQTLHKFILLFAVFDEGKSWHSETKNSLMQDRDAASARAWPKMHTVNGYVNRSLPGLIGCHRKSVYWHVIGMGTTPEVHSIFLEGHTFLVRNHRQASLEISPITFLTAQTLLMDLGQFLLFCHISSHQHDGMEAYVKVDSCPEEPQLRMKNNEEAEDYDDDLTDSEMDVVRFDDDNSPSFIQIRSVAKKHPKTWVHYIAAEEEDWDYAPLVLAPDDRSYKSQYLNNGPQRIGRKYKKVRFMAYTDETFKTREAIQHESGILGPLLYGEVGDTLLIIFKNQASRPYNIYPHGITDVRPLYSRRLPKGVKHLKDFPILPGEIFKYKWTVTVEDGPTKSDPRCLTRYYSSFVNMERDLASGLIGPLLICYKESVDQRGNQIMSDKRNVILFSVFDENRSWYLTENIQRFLPNPAGVQLEDPEFQASNIMHSINGYVFDSLQLSVCLHEVAYWYILSIGAQTDFLSVFFSGYTFKHKMVYEDTLTLFPFSGETVFMSMENPGLWILGCHNSDFRNRGMTALLKVSSCDKNTGDYYEDSYEDISAYLLSKNNAIEPRSFSQNPPVLKRHQGEITRTTLQSDQEEIDYDDTISVEMKKEDFDIYDEDENQSPRSFQKKTRHYFIAAVERLWDYGMSSSPHVLRNRAQSGSVPQFKKVVFQEFTDGSFTQPLYRGELNEHLGLLGPYIRAEVEDNIMVTFRNQASRPYSFYSSLISYEEDQRQGAEPRKNFVKPNETKTYFWKVQHHMAPTKDEFDCKAWAYFSDVDLEKDVHSGLIGPLLVCHTNTLNPAHGRQVTVQEFALFFTIFDETKSWYFTENMERNCRAPCNIQMEDPTFKENYRFHAINGYIMDTLPGLVMAQDQRIRWYLLSMGSNENIHSIHFSGHVFTVRKKEEYKMALYNLYPGVFETVEMLPSKAGIWRVECLIGEHLHAGMSTLFLVYSNKCQTPLGMASGHIRDFQITASGQYGQWAPKLARLHYSGSINAWSTKEPFSWIKVDLLAPMIIHGIKTQGARQKFSSLYISQFIIMYSLDGKKWQTYRGNSTGTLMVFFGNVDSSGIKHNIFNPPIIARYIRLHPTHYSIRSTLRMELMGCDLNSCSMPLGMESKAISDAQITASSYFTNMFATWSPSKARLHLQGRSNAWRPQVNNPKEWLQVDFQKTMKVTGVTTQGVKSLLTSMYVKEFLISSSQDGHQWTLFFQNGKVKVFQGNQDSFTPVVNSLDPPLLTRYLRIHPQSWVHQIALRMEVLGCEAQDLYGTMTRIVGGGGSEPATSGSETPGTSESATPESGPGSEPATSGSETPGSPAGSPTSTEEGTSTEPSEGSAPGSEPATSGSETPGSEPATSGSETPGSEPATSGSETPGTSTEPSEGSAPGTSESATPESGPGSEPATSGSETPGTSTEPSEGSAP

SEQ ID NO: 925 - protein, 1584 aa, Artificial Sequence
  Description of Artificial Sequence: Synthetic polypeptide
ATRRYYLGAVELSWDYMQSDLGELPVDARFPPRVPKSFPFNTSVVYKKTLFVEFTVHLFNIAKPRPPWMGLLGPTIQAEVYDTVVITLKNMASHPVSLHAVGVSYWKASEGAEYDDQTSQREKEDDKVFPGGSHTYVWQVLKENGPMASDPLCLTYSYLSHVDLVKDLNSGLIGALLVCREGSLAKEKTQTLHKFILLFAVFDEGKSWHSETKNSLMQDRDAASARAWPKMHTVNGYVNRSLPGLIGCHRKSVYWHVIGMGTTPEVHSIFLEGHTFLVRNHRQASLEISPITFLTAQTLLMDLGQFLLFCHISSHQHDGMEAYVKVDSCPEEPQLRMKNNEEAEDYDDDLTDSEMDVVRFDDDNSPSFIQIRSVAKKHPKTWVHYIAAEEEDWDYAPLVLAPDDRSYKSQYLNNGPQRIGRKYKKVRFMAYTDETFKTREAIQHESGILGPLLYGEVGDTLLIIFKNQASRPYNIYPHGITDVRPLYSRRLPKGVKHLKDFPILPGEIFKYKWTVTVEDGPTKSDPRCLTRYYSSFVNMERDLASGLIGPLLICYKESVDQRGNQIMSDKRNVILFSVFDENRSWYLTENIQRFLPNPAGVQLEDPEFQASNIMHSINGYVFDSLQLSVCLHEVAYWYILSIGAQTDFLSVFFSGYTFKHKMVYEDTLTLFPFSGETVFMSMENPGLWILGCHNSDFRNRGMTALLKVSSCDKNTGDYYEDSYEDISAYLLSKNNAIEPRSFSQNPPVLKRHQGEITRTTLQSDQEEIDYDDTISVEMKKEDFDIYDEDENQSPRSFQKKTRHYFIAAVERLWDYGMSSSPHVLRNRAQSGSVPQFKKVVFQEFTDGSFTQPLYRGELNEHLGLLGPYIRAEVEDNIMVTFRNQASRPYSFYSSLISYEEDQRQGAEPRKNFVKPNETKTYFWKVQHHMAPTKDEFDCKAWAYFSDVDLEKDVHSGLIGPLLVCHTNTLNPAHGRQVTVQEFALFFTIFDETKSWYFTENMERNCRAPCNIQMEDPTFKENYRFHAINGYIMDTLPGLVMAQDQRIRWYLLSMGSNENIHSIHFSGHVFTVRKKEEYKMALYNLYPGVFETVEMLPSKAGIWRVECLIGEHLHAGMSTLFLVYSNKCQTPLGMASGHIRDFQITASGQYGQWAPKLARLHYSGSINAWSTKEPFSWIKVDLLAPMIIHGIKTQGARQKFSSLYISQFIIMYSLDGKKWQTYRGNSTGTLMVFFGNVDSSGIKHNIFNPPIIARYIRLHPTHYSIRSTLRMELMGCDLNSCSMPLGMESKAISDAQITASSYFTNMFATWSPSKARLHLQGRSNAWRPQVNNPKEWLQVDFQKTMKVTGVTTQGVKSLLTSMYVKEFLISSSQDGHQWTLFFQNGKVKVFQGNQDSFTPVVNSLDPPLLTRYLRIHPQSWVHQIALRMEVLGCEAQDLYGGGSEPATSGSETPGTSESATPESGPGSEPATSGSETPGSPAGSPTSTEEGTSTEPSEGSAPGSEPATSGSETPGSEPATSGSETPGSEPATSGSETPGTSTEPSEGSAPGTSESATPESGPGSEPATSGSETPGTSTEPSEGSAP

SEQ ID NO: 926 - protein, 1591 aa, Artificial Sequence
  Description of Artificial Sequence: Synthetic polypeptide
ATRRYYLGAVELSWDYMQSDLGELPVDARFPPRVPKSFPFNTSVVYKKTLFVEFTVHLFNIAKPRPPWMGLLGPTIQAEVYDTVVITLKNMASHPVSLHAVGVSYWKASEGAEYDDQTSQREKEDDKVFPGGSHTYVWQVLKENGPMASDPLCLTYSYLSHVDLVKDLNSGLIGALLVCREGSLAKEKTQTLHKFILLFAVFDEGKSWHSETKNSLMQDRDAASARAWPKMHTVNGYVNRSLPGLIGCHRKSVYWHVIGMGTTPEVHSIFLEGHTFLVRNHRQASLEISPITFLTAQTLLMDLGQFLLFCHISSHQHDGMEAYVKVDSCPEEPQLRMKNNEEAEDYDDDLTDSEMDVVRFDDDNSPSFIQIRSVAKKHPKTWVHYIAAEEEDWDYAPLVLAPDDRSYKSQYLNNGPQRIGRKYKKVRFMAYTDETFKTREAIQHESGILGPLLYGEVGDTLLIIFKNQASRPYNIYPHGITDVRPLYSRRLPKGVKHLKDFPILPGEIFKYKWTVTVEDGPTKSDPRCLTRYYSSFVNMERDLASGLIGPLLICYKESVDQRGNQIMSDKRNVILFSVFDENRSWYLTENIQRFLPNPAGVQLEDPEFQASNIMHSINGYVFDSLQLSVCLHEVAYWYILSIGAQTDFLSVFFSGYTFKHKMVYEDTLTLFPFSGETVFMSMENPGLWILGCHNSDFRNRGMTALLKVSSCDKNTGDYYEDSYEDISAYLLSKNNAIEPRSFSQNPPVLKRHQGEITRTTLQSDQEEIDYDDTISVEMKKEDFDIYDEDENQSPRSFQKKTRHYFIAAVERLWDYGMSSSPHVLRNRAQSGSVPQFKKVVFQEFTDGSFTQPLYRGELNEHLGLLGPYIRAEVEDNIMVTFRNQASRPYSFYSSLISYEEDQRQGAEPRKNFVKPNETKTYFWKVQHHMAPTKDEFDCKAWAYFSDVDLEKDVHSGLIGPLLVCHTNTLNPAHGRQVTVQEFALFFTIFDETKSWYFTENMERNCRAPCNIQMEDPTFKENYRFHAINGYIMDTLPGLVMAQDQRIRWYLLSMGSNENIHSIHFSGHVFTVRKKEEYKMALYNLYPGVFETVEMLPSKAGIWRVECLIGEHLHAGMSTLFLVYSNKCQTPLGMASGHIRDFQITASGQYGQWAPKLARLHYSGSINAWSTKEPFSWIKVDLLAPMIIHGIKTQGARQKFSSLYISQFIIMYSLDGKKWQTYRGNSTGTLMVFFGNVDSSGIKHNIFNPPIIARYIRLHPTHYSIRSTLRMELMGCDLNSCSMPLGMESKAISDAQITASSYFTNMFATWSPSKARLHLQGRSNAWRPQVNNPKEWLQVDFQKTMKVTGVTTQGVKSLLTSMYVKEFLISSSQDGHQWTLFFQNGKVKVFQGNQDSFTPVVNSLDPPLLTRYLRIHPQSWVHQIALRMEVLGCEAQDLYGKLTRAETGGSEPATSGSETPGTSESATPESGPGSEPATSGSETPGSPAGSPTSTEEGTSTEPSEGSAPGSEPATSGSETPGSEPATSGSETPGSEPATSGSETPGTSTEPSEGSAPGTSESATPESGPGSEPATSGSETPGTSTEPSEGSAP

SEQ ID NO: 927 - protein, 1592 aa, Artificial Sequence
  Description of Artificial Sequence: Synthetic polypeptide
ATRRYYLGAVELSWDYMQSDLGELPVDARFPPRVPKSFPFNTSVVYKKTLFVEFTVHLFNIAKPRPPWMGLLGPTIQAEVYDTVVITLKNMASHPVSLHAVGVSYWKASEGAEYDDQTSQREKEDDKVFPGGSHTYVWQVLKENGPMASDPLCLTYSYLSHVDLVKDLNSGLIGALLVCREGSLAKEKTQTLHKFILLFAVFDEGKSWHSETKNSLMQDRDAASARAWPKMHTVNGYVNRSLPGLIGCHRKSVYWHVIGMGTTPEVHSIFLEGHTFLVRNHRQASLEISPITFLTAQTLLMDLGQFLLFCHISSHQHDGMEAYVKVDSCPEEPQLRMKNNEEAEDYDDDLTDSEMDVVRFDDDNSPSFIQIRSVAKKHPKTWVHYIAAEEEDWDYAPLVLAPDDRSYKSQYLNNGPQRIGRKYKKVRFMAYTDETFKTREAIQHESGILGPLLYGEVGDTLLIIFKNQASRPYNIYPHGITDVRPLYSRRLPKGVKHLKDFPILPGEIFKYKWTVTVEDGPTKSDPRCLTRYYSSFVNMERDLASGLIGPLLICYKESVDQRGNQIMSDKRNVILFSVFDENRSWYLTENIQRFLPNPAGVQLEDPEFQASNIMHSINGYVFDSLQLSVCLHEVAYWYILSIGAQTDFLSVFFSGYTFKHKMVYEDTLTLFPFSGETVFMSMENPGLWILGCHNSDFRNRGMTALLKVSSCDKNTGDYYEDSYEDISAYLLSKNNAIEPRSFSQNPPVLKRHQGEITRTTLQSDQEEIDYDDTISVEMKKEDFDIYDEDENQSPRSFQKKTRHYFIAAVERLWDYGMSSSPHVLRNRAQSGSVPQFKKVVFQEFTDGSFTQPLYRGELNEHLGLLGPYIRAEVEDNIMVTFRNQASRPYSFYSSLISYEEDQRQGAEPRKNFVKPNETKTYFWKVQHHMAPTKDEFDCKAWAYFSDVDLEKDVHSGLIGPLLVCHTNTLNPAHGRQVTVQEFALFFTIFDETKSWYFTENMERNCRAPCNIQMEDPTFKENYRFHAINGYIMDTLPGLVMAQDQRIRWYLLSMGSNENIHSIHFSGHVFTVRKKEEYKMALYNLYPGVFETVEMLPSKAGIWRVECLIGEHLHAGMSTLFLVYSNKCQTPLGMASGHIRDFQITASGQYGQWAPKLARLHYSGSINAWSTKEPFSWIKVDLLAPMIIHGIKTQGARQKFSSLYISQFIIMYSLDGKKWQTYRGNSTGTLMVFFGNVDSSGIKHNIFNPPIIARYIRLHPTHYSIRSTLRMELMGCDLNSCSMPLGMESKAISDAQITASSYFTNMFATWSPSKARLHLQGRSNAWRPQVNNPKEWLQVDFQKTMKVTGVTTQGVKSLLTSMYVKEFLISSSQDGHQWTLFFQNGKVKVFQGNQDSFTPVVNSLDPPLLTRYLRIHPQSWVHQIALRMEVLGCEAQDLYGLTPRSLLVGGSEPATSGSETPGTSESATPESGPGSEPATSGSETPGSPAGSPTSTEEGTSTEPSEGSAPGSEPATSGSETPGSEPATSGSETPGSEPATSGSETPGTSTEPSEGSAPGTSESATPESGPGSEPATSGSETPGTSTEPSEGSAP

SEQ ID NO: 928 - protein, 2457 aa, Artificial Sequence
  Description of Artificial Sequence: Synthetic polypeptide
GSEPATSGSETPGTSESATPESGPGSEPATSGSETPGSPAGSPTSTEEGTSTEPSEGSAPGSEPATSGSETPGSEPATSGSETPGSEPATSGSETPGTSTEPSEGSAPGTSESATPESGPGSEPATSGSETPGTSTEPSEGSAPGATRRYYLGAVELSWDYMQSDLGELPVDARFPPRVPKSFPFNTSVVYKKTLFVEFTVHLFNIAKPRPPWMGLLGPTIQAEVYDTVVITLKNMASHPVSLHAVGVSYWKASEGAEYDDQTSQREKEDDKVFPGGSHTYVWQVLKENGPMASDPLCLTYSYLSHVDLVKDLNSGLIGALLVCREGSLAKEKTQTLHKFILLFAVFDEGKSWHSETKNSLMQDRDAASARAWPKMHTVNGYVNRSLPGLIGCHRKSVYWHVIGMGTTPEVHSIFLEGHTFLVRNHRQASLEISPITFLTAQTLLMDLGQFLLFCHISSHQHDGMEAYVKVDSCPEEPQLRMKNNEEAEDYDDDLTDSEMDVVRFDDDNSPSFIQIRSVAKKHPKTWVHYIAAEEEDWDYAPLVLAPDDRSYKSQYLNNGPQRIGRKYKKVRFMAYTDETFKTREAIQHESGILGPLLYGEVGDTLLIIFKNQASRPYNIYPHGITDVRPLYSRRLPKGVKHLKDFPILPGEIFKYKWTVTVEDGPTKSDPRCLTRYYSSFVNMERDLASGLIGPLLICYKESVDQRGNQIMSDKRNVILFSVFDENRSWYLTENIQRFLPNPAGVQLEDPEFQASNIMHSINGYVFDSLQLSVCLHEVAYWYILSIGAQTDFLSVFFSGYTFKHKMVYEDTLTLFPFSGETVFMSMENPGLWILGCHNSDFRNRGMTALLKVSSCDKNTGDYYEDSYEDISAYLLSKNNAIEPRSFSQNPPVLKRHQREITRTTLQSDQEEIDYDDTISVEMKKEDFDIYDEDENQSPRSFQKKTRHYFIAAVERLWDYGMSSSPHVLRNRAQSGSVPQFKKVVFQEFTDGSFTQPLYRGELNEHLGLLGPYIRAEVEDNIMVTFRNQASRPYSFYSSLISYEEDQRQGAEPRKNFVKPNETKTYFWKVQHHMAPTKDEFDCKAWAYFSDVDLEKDVHSGLIGPLLVCHTNTLNPAHGRQVTVQEFALFFTIFDETKSWYFTENMERNCRAPCNIQMEDPTFKENYRFHAINGYIMDTLPGLVMAQDQRIRWYLLSMGSNENIHSIHFSGHVFTVRKKEEYKMALYNLYPGVFETVEMLPSKAGIWRVECLIGEHLHAGMSTLFLVYSNKCQTPLGMASGHIRDFQITASGQYGQWAPKLARLHYSGSINAWSTKEPFSWIKVDLLAPMIIHGIKTQGARQKFSSLYISQFIIMYSLDGKKWQTYRGNSTGTLMVFFGNVDSSGIKHNIFNPPIIARYIRLHPTHYSIRSTLRMELMGCDLNSCSMPLGMESKAISDAQITASSYFTNMFATWSPSKARLHLQGRSNAWRPQVNNPKEWLQVDFQKTMKVTGVTTQGVKSLLTSMYVKEFLISSSQDGHQWTLFFQNGKVKVFQGNQDSFTPVVNSLDPPLLTRYLRIHPQSWVHQIALRMEVLGCEAQDLYGAPLGLRLRGGSPAGSPTSTEEGTSESATPESGPGTSTEPSEGSAPGSPAGSPTSTEEGTSTEPSEGSAPGTSTEPSEGSAPGTSESATPESGPGSEPATSGSETPGSEPATSGSETPGSPAGSPTSTEEGTSESATPESGPGTSTEPSEGSAPGTSTEPSEGSAPGSPAGSPTSTEEGTSTEPSEGSAPGTSTEPSEGSAPGTSESATPESGPGTSTEPSEGSAPGTSESATPESGPGSEPATSGSETPGTSTEPSEGSAPGTSTEPSEGSAPGTSESATPESGPGTSESATPESGPGSPAGSPTSTEEGTSESATPESGPGSEPATSGSETPGTSESATPESGPGTSTEPSEGSAPGTSTEPSEGSAPGTSTEPSEGSAPGTSTEPSEGSAPGTSTEPSEGSAPGTSTEPSEGSAPGSPAGSPTSTEEGTSTEPSEGSAPGTSESATPESGPGSEPATSGSETPGTSESATPESGPGSEPATSGSETPGTSESATPESGPGTSTEPSEGSAPGTSESATPESGPGSPAGSPTSTEEGSPAGSPTSTEEGSPAGSPTSTEEGTSESATPESGPGTSTEPSEGSAPGTSESATPESGPGSEPATSGSETPGTSESATPESGPGSEPATSGSETPGTSESATPESGPGTSTEPSEGSAPGSPAGSPTSTEEGTSESATPESGPGSEPATSGSETPGTSESATPESGPGSPAGSPTSTEEGSPAGSPTSTEEGTSTEPSEGSAPGTSESATPESGPGTSESATPESGPGTSESATPESGPGSEPATSGSETPGSEPATSGSETPGSPAGSPTSTEEGTSTEPSEGSAPGTSTEPSEGSAPGSEPATSGSETPGTSESATPESGPGTSTEPSEGSAP

SEQ ID NO: 929 - protein, 2457 aa, Artificial Sequence
  Description of Artificial Sequence: Synthetic polypeptide
GSEPATSGSETPGTSESATPESGPGSEPATSGSETPGSPAGSPTSTEEGTSTEPSEGSAPGSEPATSGSETPGSEPATSGSETPGSEPATSGSETPGTSTEPSEGSAPGTSESATPESGPGSEPATSGSETPGTSTEPSEGSAPGATRRYYLGAVELSWDYMQSDLGELPVDARFPPRVPKSFPFNTSVVYKKTLFVEFTVHLFNIAKPRPPWMGLLGPTIQAEVYDTVVITLKNMASHPVSLHAVGVSYWKASEGAEYDDQTSQREKEDDKVFPGGSHTYVWQVLKENGPMASDPLCLTYSYLSHVDLVKDLNSGLIGALLVCREGSLAKEKTQTLHKFILLFAVFDEGKSWHSETKNSLMQDRDAASARAWPKMHTVNGYVNRSLPGLIGCHRKSVYWHVIGMGTTPEVHSIFLEGHTFLVRNHRQASLEISPITFLTAQTLLMDLGQFLLFCHISSHQHDGMEAYVKVDSCPEEPQLRMKNNEEAEDYDDDLTDSEMDVVRFDDDNSPSFIQIRSVAKKHPKTWVHYIAAEEEDWDYAPLVLAPDDRSYKSQYLNNGPQRIGRKYKKVRFMAYTDETFKTREAIQHESGILGPLLYGEVGDTLLIIFKNQASRPYNIYPHGITDVRPLYSRRLPKGVKHLKDFPILPGEIFKYKWTVTVEDGPTKSDPRCLTRYYSSFVNMERDLASGLIGPLLICYKESVDQRGNQIMSDKRNVILFSVFDENRSWYLTENIQRFLPNPAGVQLEDPEFQASNIMHSINGYVFDSLQLSVCLHEVAYWYILSIGAQTDFLSVFFSGYTFKHKMVYEDTLTLFPFSGETVFMSMENPGLWILGCHNSDFRNRGMTALLKVSSCDKNTGDYYEDSYEDISAYLLSKNNAIEPRSFSQNPPVLKRHQREITRTTLQSDQEEIDYDDTISVEMKKEDFDIYDEDENQSPRSFQKKTRHYFIAAVERLWDYGMSSSPHVLRNRAQSGSVPQFKKVVFQEFTDGSFTQPLYRGELNEHLGLLGPYIRAEVEDNIMVTFRNQASRPYSFYSSLISYEEDQRQGAEPRKNFVKPNETKTYFWKVQHHMAPTKDEFDCKAWAYFSDVDLEKDVHSGLIGPLLVCHTNTLNPAHGRQVTVQEFALFFTIFDETKSWYFTENMERNCRAPCNIQMEDPTFKENYRFHAINGYIMDTLPGLVMAQDQRIRWYLLSMGSNENIHSIHFSGHVFTVRKKEEYKMALYNLYPGVFETVEMLPSKAGIWRVECLIGEHLHAGMSTLFLVYSNKCQTPLGMASGHIRDFQITASGQYGQWAPKLARLHYSGSINAWSTKEPFSWIKVDLLAPMIIHGIKTQGARQKFSSLYISQFIIMYSLDGKKWQTYRGNSTGTLMVFFGNVDSSGIKHNIFNPPIIARYIRLHPTHYSIRSTLRMELMGCDLNSCSMPLGMESKAISDAQITASSYFTNMFATWSPSKARLHLQGRSNAWRPQVNNPKEWLQVDFQKTMKVTGVTTQGVKSLLTSMYVKEFLISSSQDGHQWTLFFQNGKVKVFQGNQDSFTPVVNSLDPPLLTRYLRIHPQSWVHQIALRMEVLGCEAQDLYGTMTRIVGGGGSPAGSPTSTEEGTSESATPESGPGTSTEPSEGSAPGSPAGSPTSTEEGTSTEPSEGSAPGTSTEPSEGSAPGTSESATPESGPGSEPATSGSETPGSEPATSGSETPGSPAGSPTSTEEGTSESATPESGPGTSTEPSEGSAPGTSTEPSEGSAPGSPAGSPTSTEEGTSTEPSEGSAPGTSTEPSEGSAPGTSESATPESGPGTSTEPSEGSAPGTSESATPESGPGSEPATSGSETPGTSTEPSEGSAPGTSTEPSEGSAPGTSESATPESGPGTSESATPESGPGSPAGSPTSTEEGTSESATPESGPGSEPATSGSETPGTSESATPESGPGTSTEPSEGSAPGTSTEPSEGSAPGTSTEPSEGSAPGTSTEPSEGSAPGTSTEPSEGSAPGTSTEPSEGSAPGSPAGSPTSTEEGTSTEPSEGSAPGTSESATPESGPGSEPATSGSETPGTSESATPESGPGSEPATSGSETPGTSESATPESGPGTSTEPSEGSAPGTSESATPESGPGSPAGSPTSTEEGSPAGSPTSTEEGSPAGSPTSTEEGTSESATPESGPGTSTEPSEGSAPGTSESATPESGPGSEPATSGSETPGTSESATPESGPGSEPATSGSETPGTSESATPESGPGTSTEPSEGSAPGSPAGSPTSTEEGTSESATPESGPGSEPATSGSETPGTSESATPESGPGSPAGSPTSTEEGSPAGSPTSTEEGTSTEPSEGSAPGTSESATPESGPGTSESATPESGPGTSESATPESGPGSEPATSGSETPGSEPATSGSETPGSPAGSPTSTEEGTSTEPSEGSAPGTSTEPSEGSAPGSEPATSGSETPGTSESATPESGPGTSTEPSEGSAP

SEQ ID NO: 930 - protein, 2168 aa, Artificial Sequence
  Description of Artificial Sequence: Synthetic polypeptide
SGTASSSPGSSTPSGATGSPGTPGSGTASSSPGSSTPSGATGSPGSSTPSGATGSPGSSPSASTGTGPGSSPSASTGTGPGASPGTSSTGSPGTPGSGTASSSPGSSTPSGATGSPGSSPSASTGTGPGSSPSASTGTGPGASPGATRRYYLGAVELSWDYMQSDLGELPVDARFPPRVPKSFPFNTSVVYKKTLFVEFTVHLFNIAKPRPPWMGLLGPTIQAEVYDTVVITLKNMASHPVSLHAVGVSYWKASEGAEYDDQTSQREKEDDKVFPGGSHTYVWQVLKENGPMASDPLCLTYSYLSHVDLVKDLNSGLIGALLVCREGSLAKEKTQTLHKFILLFAVFDEGKSWHSETKNSLMQDRDAASARAWPKMHTVNGYVNRSLPGLIGCHRKSVYWHVIGMGTTPEVHSIFLEGHTFLVRNHRQASLEISPITFLTAQTLLMDLGQFLLFCHISSHQHDGMEAYVKVDSCPEEPQLRMKNNEEAEDYDDDLTDSEMDVVRFDDDNSPSFIQIRSVAKKHPKTWVHYIAAEEEDWDYAPLVLAPDDRSYKSQYLNNGPQRIGRKYKKVRFMAYTDETFKTREAIQHESGILGPLLYGEVGDTLLIIFKNQASRPYNIYPHGITDVRPLYSRRLPKGVKHLKDFPILPGEIFKYKWTVTVEDGPTKSDPRCLTRYYSSFVNMERDLASGLIGPLLICYKESVDQRGNQIMSDKRNVILFSVFDENRSWYLTENIQRFLPNPAGVQLEDPEFQASNIMHSINGYVFDSLQLSVCLHEVAYWYILSIGAQTDFLSVFFSGYTFKHKMVYEDTLTLFPFSGETVFMSMENPGLWILGCHNSDFRNRGMTALLKVSSCDKNTGDYYEDSYEDISAYLLSKNNAIEPRSFSQNPPVLKRHQREITRTTLQSDQEEIDYDDTISVEMKKEDFDIYDEDENQSPRSFQKKTRHYFIAAVERLWDYGMSSSPHVLRNRAQSGSVPQFKKVVFQEFTDGSFTQPLYRGELNEHLGLLGPYIRAEVEDNIMVTFRNQASRPYSFYSSLISYEEDQRQGAEPRKNFVKPNETKTYFWKVQHHMAPTKDEFDCKAWAYFSDVDLEKDVHSGLIGPLLVCHTNTLNPAHGRQVTVQEFALFFTIFDETKSWYFTENMERNCRAPCNIQMEDPTFKENYRFHAINGYIMDTLPGLVMAQDQRIRWYLLSMGSNENIHSIHFSGHVFTVRKKEEYKMALYNLYPGVFETVEMLPSKAGIWRVECLIGEHLHAGMSTLFLVYSNKCQTPLGMASGHIRDFQITASGQYGQWAPKLARLHYSGSINAWSTKEPFSWIKVDLLAPMIIHGIKTQGARQKFSSLYISQFIIMYSLDGKKWQTYRGNSTGTLMVFFGNVDSSGIKHNIFNPPIIARYIRLHPTHYSIRSTLRMELMGCDLNSCSMPLGMESKAISDAQITASSYFTNMFATWSPSKARLHLQGRSNAWRPQVNNPKEWLQVDFQKTMKVTGVTTQGVKSLLTSMYVKEFLISSSQDGHQWTLFFQNGKVKVFQGNQDSFTPVVNSLDPPLLTRYLRIHPQSWVHQIALRMEVLGCEAQDLYGKLTRAETGPGTPGSGTASSSPGSSTPSGATGSPGSSPSASTGTGPGSSPSASTGTGPGSSTPSGATGSPGSSTPSGATGSPGASPGTSSTGSPGASPGTSSTGSPGASPGTSSTGSPGTPGSGTASSSPGASPGTSSTGSPGASPGTSSTGSPGASPGTSSTGSPGSSPSASTGTGPGTPGSGTASSSPGASPGTSSTGSPGASPGTSSTGSPGASPGTSSTGSPGSSTPSGATGSPGSSTPSGATGSPGASPGTSSTGSPGTPGSGTASSSPGSSTPSGATGSPGSSTPSGATGSPGSSTPSGATGSPGSSPSASTGTGPGASPGTSSTGSPGASPGTSSTGSPGTPGSGTASSSPGASPGTSSTGSPGASPGTSSTGSPGASPGTSSTGSPGASPGTSSTGSPGTPGSGTASSSPGSSTPSGATGSPGTPGSGTASSSPGSSTPSGATGSPGTPGSGTASSSPGSSTPSGATGSPGSSTPSGATGSPGSSPSASTGTGPGSSPSASTGTGPGASPGTSSTGSPGTPGSGTASSSPGSSTPSGATGSPGSSPSASTGTGPGSSPSASTGTGPGASPGTSSTGS

SEQ ID NO: 931 - protein, 2456 aa, Artificial Sequence
  Description of Artificial Sequence: Synthetic polypeptide
GSEPATSGSETPGTSESATPESGPGSEPATSGSETPGSPAGSPTSTEEGTSTEPSEGSAPGSEPATSGSETPGSEPATSGSETPGSEPATSGSETPGTSTEPSEGSAPGTSESATPESGPGSEPATSGSETPGTSTEPSEGSAPGKLTRAETGATRRYYLGAVELSWDYMQSDLGELPVDARFPPRVPKSFPFNTSVVYKKTLFVEFTDHLFNIAKPRPPWMGLLGPTIQAEVYDTVVITLKNMASHPVSLHAVGVSYWKASEGAEYDDQTSQREKEDDKVFPGGSHTYVWQVLKENGPMASDPLCLTYSYLSHVDLVKDLNSGLIGALLVCREGSLAKEKTQTLHKFILLFAVFDEGKSWHSETKNSLMQDRDAASARAWPKMHTVNGYVNRSLPGLIGCHRKSVYWHVIGMGTTPEVHSIFLEGHTFLVRNHRQASLEISPITFLTAQTLLMDLGQFLLFCHISSHQHDGMEAYVKVDSCPEEPQLRMKNNEEAEDYDDDLTDSEMDVVRFDDDNSPSFIQIRSVAKKHPKTWVHYIAAEEEDWDYAPLVLAPDDRSYKSQYLNNGPQRIGRKYKKVRFMAYTDETFKTREAIQHESGILGPLLYGEVGDTLLIIFKNQASRPYNIYPHGITDVRPLYSRRLPKGVKHLKDFPILPGEIFKYKWTVTVEDGPTKSDPRCLTRYYSSFVNMERDLASGLIGPLLICYKESVDQRGNQIMSDKRNVILFSVFDENRSWYLTENIQRFLPNPAGVQLEDPEFQASNIMHSINGYVFDSLQLSVCLHEVAYWYILSIGAQTDFLSVFFSGYTFKHKMVYEDTLTLFPFSGETVFMSMENPGLWILGCHNSDFRNRGMTALLKVSSCDKNTGDYYEDSYEDISAYLLSKNNAIEPRSFSQNPPVLKRHQREITRTTLQSDQEEIDYDDTISVEMKKEDFDIYDEDENQSPRSFQKKTRHYFIAAVERLWDYGMSSSPHVLRNRAQSGSVPQFKKVVFQEFTDGSFTQPLYRGELNEHLGLLGPYIRAEVEDNIMVTFRNQASRPYSFYSSLISYEEDQRQGAEPRKNFVKPNETKTYFWKVQHHMAPTKDEFDCKAWAYFSDVDLEKDVHSGLIGPLLVCHTNTLNPAHGRQVTVQEFALFFTIFDETKSWYFTENMERNCRAPCNIQMEDPTFKENYRFHAINGYIMDTLPGLVMAQDQRIRWYLLSMGSNENIHSIHFSGHVFTVRKKEEYKMALYNLYPGVFETVEMLPSKAGIWRVECLIGEHLHAGMSTLFLVYSNKCQTPLGMASGHIRDFQITASGQYGQWAPKLARLHYSGSINAWSTKEPFSWIKVDLLAPMIIHGIKTQGARQKFSSLYISQFIIMYSLDGKKWQTYRGNSTGTLMVFFGNVDSSGIKHNIFNPPIIARYIRLHPTHYSIRSTLRMELMGCDLNSCSMPLGMESKAISDAQITASSYFTNMFATWSPSKARLHLQGRSNAWRPQVNNPKEWLQVDFQKTMKVTGVTTQGVKSLLTSMYVKEFLISSSQDGHQWTLFFQNGKVKVFQGNQDSFTPVVNSLDPPLLTRYLRIHPQSWVHQIALRMEVLGCEAQDLYGGSPAGSPTSTEEGTSESATPESGPGTSTEPSEGSAPGSPAGSPTSTEEGTSTEPSEGSAPGTSTEPSEGSAPGTSESATPESGPGSEPATSGSETPGSEPATSGSETPGSPAGSPTSTEEGTSESATPESGPGTSTEPSEGSAPGTSTEPSEGSAPGSPAGSPTSTEEGTSTEPSEGSAPGTSTEPSEGSAPGTSESATPESGPGTSTEPSEGSAPGTSESATPESGPGSEPATSGSETPGTSTEPSEGSAPGTSTEPSEGSAPGTSESATPESGPGTSESATPESGPGSPAGSPTSTEEGTSESATPESGPGSEPATSGSETPGTSESATPESGPGTSTEPSEGSAPGTSTEPSEGSAPGTSTEPSEGSAPGTSTEPSEGSAPGTSTEPSEGSAPGTSTEPSEGSAPGSPAGSPTSTEEGTSTEPSEGSAPGTSESATPESGPGSEPATSGSETPGTSESATPESGPGSEPATSGSETPGTSESATPESGPGTSTEPSEGSAPGTSESATPESGPGSPAGSPTSTEEGSPAGSPTSTEEGSPAGSPTSTEEGTSESATPESGPGTSTEPSEGSAPGTSESATPESGPGSEPATSGSETPGTSESATPESGPGSEPATSGSETPGTSESATPESGPGTSTEPSEGSAPGSPAGSPTSTEEGTSESATPESGPGSEPATSGSETPGTSESATPESGPGSPAGSPTSTEEGSPAGSPTSTEEGTSTEPSEGSAPGTSESATPESGPGTSESATPESGPGTSESATPESGPGSEPATSGSETPGSEPATSGSETPGSPAGSPTSTEEGTSTEPSEGSAPGTSTEPSEGSAPGSEPATSGSETPGTSESATPESGPGTSTEPSEGSAP

SEQ ID NO: 932 - protein, 2457 aa, Artificial Sequence
  Description of Artificial Sequence: Synthetic polypeptide
GSEPATSGSETPGTSESATPESGPGSEPATSGSETPGSPAGSPTSTEEGTSTEPSEGSAPGSEPATSGSETPGSEPATSGSETPGSEPATSGSETPGTSTEPSEGSAPGTSESATPESGPGSEPATSGSETPGTSTEPSEGSAPGATRRYYLGAVELSWDYMQSDLGELPVDARFPPRVPKSFPFNTSVVYKKTLFVEFTVHLFNIAKPRPPWMGLLGPTIQAEVYDTVVITLKNMASHPVSLHAVGVSYWKASEGAEYDDQTSQREKEDDKVFPGGSHTYVWQVLKENGPMASDPLCLTYSYLSHVDLVKDLNSGLIGALLVCREGSLAKEKTQTLHKFILLFAVFDEGKSWHSETKNSLMQDRDAASARAWPKMHTVNGYVNRSLPGLIGCHRKSVYWHVIGMGTTPEVHSIFLEGHTFLVRNHRQASLEISPITFLTAQTLLMDLGQFLLFCHISSHQHDGMEAYVKVDSCPEEPQLRMKNNEEAEDYDDDLTDSEMDVVRFDDDNSPSFIQIRSVAKKHPKTWVHYIAAEEEDWDYAPLVLAPDDRSYKSQYLNNGPQRIGRKYKKVRFMAYTDETFKTREAIQHESGILGPLLYGEVGDTLLIIFKNQASRPYNIYPHGITDVRPLYSRRLPKGVKHLKDFPILPGEIFKYKWTVTVEDGPTKSDPRCLTRYYSSFVNMERDLASGLIGPLLICYKESVDQRGNQIMSDKRNVILFSVFDENRSWYLTENIQRFLPNPAGVQLEDPEFQASNIMHSINGYVFDSLQLSVCLHEVAYWYILSIGAQTDFLSVFFSGYTFKHKMVYEDTLTLFPFSGETVFMSMENPGLWILGCHNSDFRNRGMTALLKVSSCDKNTGDYYEDSYEDISAYLLSKNNAIEPRSFSQNPPVLKRHQREITRTTLQSDQEEIDYDDTISVEMKKEDFDIYDEDENQSPRSFQKKTRHYFIAAVERLWDYGMSSSPHVLRNRAQSGSVPQFKKVVFQEFTDGSFTQPLYRGELNEHLGLLGPYIRAEVEDNIMVTFRNQASRPYSFYSSLISYEEDQRQGAEPRKNFVKPNETKTYFWKVQHHMAPTKDEFDCKAWAYFSDVDLEKDVHSGLIGPLLVCHTNTLNPAHGRQVTVQEFALFFTIFDETKSWYFTENMERNCRAPCNIQMEDPTFKENYRFHAINGYIMDTLPGLVMAQDQRIRWYLLSMGSNENIHSIHFSGHVFTVRKKEEYKMALYNLYPGVFETVEMLPSKAGIWRVECLIGEHLHAGMSTLFLVYSNKCQTPLGMASGHIRDFQITASGQYGQWAPKLARLHYSGSINAWSTKEPFSWIKVDLLAPMIIHGIKTQGARQKFSSLYISQFIIMYSLDGKKWQTYRGNSTGTLMVFFGNVDSSGIKHNIFNPPIIARYIRLHPTHYSIRSTLRMELMGCDLNSCSMPLGMESKAISDAQITASSYFTNMFATWSPSKARLHLQGRSNAWRPQVNNPKEWLQVDFQKTMKVTGVTTQGVKSLLTSMYVKEFLISSSQDGHQWTLFFQNGKVKVFQGNQDSFTPVVNSLDPPLLTRYLRIHPQSWVHQIALRMEVLGCEAQDLYGLTPRSLLVGGSPAGSPTSTEEGTSESATPESGPGTSTEPSEGSAPGSPAGSPTSTEEGTSTEPSEGSAPGTSTEPSEGSAPGTSESATPESGPGSEPATSGSETPGSEPATSGSETPGSPAGSPTSTEEGTSESATPESGPGTSTEPSEGSAPGTSTEPSEGSAPGSPAGSPTSTEEGTSTEPSEGSAPGTSTEPSEGSAPGTSESATPESGPGTSTEPSEGSAPGTSESATPESGPGSEPATSGSETPGTSTEPSEGSAPGTSTEPSEGSAPGTSESATPESGPGTSESATPESGPGSPAGSPTSTEEGTSESATPESGPGSEPATSGSETPGTSESATPESGPGTSTEPSEGSAPGTSTEPSEGSAPGTSTEPSEGSAPGTSTEPSEGSAPGTSTEPSEGSAPGTSTEPSEGSAPGSPAGSPTSTEEGTSTEPSEGSAPGTSESATPESGPGSEPATSGSETPGTSESATPESGPGSEPATSGSETPGTSESATPESGPGTSTEPSEGSAPGTSESATPESGPGSPAGSPTSTEEGSPAGSPTSTEEGSPAGSPTSTEEGTSESATPESGPGTSTEPSEGSAPGTSESATPESGPGSEPATSGSETPGTSESATPESGPGSEPATSGSETPGTSESATPESGPGTSTEPSEGSAPGSPAGSPTSTEEGTSESATPESGPGSEPATSGSETPGTSESATPESGPGSPAGSPTSTEEGSPAGSPTSTEEGTSTEPSEGSAPGTSESATPESGPGTSESATPESGPGTSESATPESGPGSEPATSGSETPGSEPATSGSETPGSPAGSPTSTEEGTSTEPSEGSAPGTSTEPSEGSAPGSEPATSGSETPGTSESATPESGPGTSTEPSEGSAP

SEQ ID NO: 933 - protein, 3351 aa, Artificial Sequence
  Description of Artificial Sequence: Synthetic polypeptide
GSPAGSPTSTEEGTSESATPESGPGTSTEPSEGSAPGSPAGSPTSTEEGTSTEPSEGSAPGTSTEPSEGSAPGTSESATPESGPGSEPATSGSETPGSEPATSGSETPGSPAGSPTSTEEGTSESATPESGPGTSTEPSEGSAPGTSTEPSEGSAPGSPAGSPTSTEEGTSTEPSEGSAPGTSTEPSEGSAPGTSESATPESGPGTSTEPSEGSAPGTSESATPESGPGSEPATSGSETPGTSTEPSEGSAPGTSTEPSEGSAPGTSESATPESGPGTSESATPESGPGSPAGSPTSTEEGTSESATPESGPGSEPATSGSETPGTSESATPESGPGTSTEPSEGSAPGTSTEPSEGSAPGTSTEPSEGSAPGTSTEPSEGSAPGTSTEPSEGSAPGTSTEPSEGSAPGSPAGSPTSTEEGTSTEPSEGSAPGTSESATPESGPGSEPATSGSETPGTSESATPESGPGSEPATSGSETPGTSESATPESGPGTSTEPSEGSAPGTSESATPESGPGSPAGSPTSTEEGSPAGSPTSTEEGSPAGSPTSTEEGTSESATPESGPGTSTEPSEGSAPGTSESATPESGPGSEPATSGSETPGTSESATPESGPGSEPATSGSETPGTSESATPESGPGTSTEPSEGSAPGSPAGSPTSTEEGTSESATPESGPGSEPATSGSETPGTSESATPESGPGSPAGSPTSTEEGSPAGSPTSTEEGTSTEPSEGSAPGTSESATPESGPGTSESATPESGPGTSESATPESGPGSEPATSGSETPGSEPATSGSETPGSPAGSPTSTEEGTSTEPSEGSAPGTSTEPSEGSAPGSEPATSGSETPGTSESATPESGPGTSTEPSEGSAPGATRRYYLGAVELSWDYMQSDLGELPVDARFPPRVPKSFPFNTSVVYKKTLFVEFTDHLFNIAKPRPPWMGLLGPTIQAEVYDTVVITLKNMASHPVSLHAVGVSYWKASEGAEYDDQTSQREKEDDKVFPGGSHTYVWQVLKENGPMASDPLCLTYSYLSHVDLVKDLNSGLIGALLVCREGSLAKEKTQTLHKFILLFAVFDEGKSWHSETKNSLMQDRDAASARAWPKMHTVNGYVNRSLPGLIGCHRKSVYWHVIGMGTTPEVHSIFLEGHTFLVRNHRQASLEISPITFLTAQTLLMDLGQFLLFCHISSHQHDGMEAYVKVDSCPEEPQLRMKNNEEAEDYDDDLTDSEMDVVRFDDDNSPSFIQIRSVAKKHPKTWVHYIAAEEEDWDYAPLVLAPDDRSYKSQYLNNGPQRIGRKYKKVRFMAYTDETFKTREAIQHESGILGPLLYGEVGDTLLIIFKNQASRPYNIYPHGITDVRPLYSRRLPKGVKHLKDFPILPGEIFKYKWTVTVEDGPTKSDPRCLTRYYSSFVNMERDLASGLIGPLLICYKESVDQRGNQIMSDKRNVILFSVFDENRSWYLTENIQRFLPNPAGVQLEDPEFQASNIMHSINGYVFDSLQLSVCLHEVAYWYILSIGAQTDFLSVFFSGYTFKHKMVYEDTLTLFPFSGETVFMSMENPGLWILGCHNSDFRNRGMTALLKVSSCDKNTGDYYEDSYEDISAYLLSKNNAIEPRSFSQNSRHPSTRQKQFNATTIPENDIEKTDPWFAHRTPMPKIQNVSSSDLLMLLRQSPTPHGLSLSDLQEAKYETFSDDPSPGAIDSNNSLSEMTHFRPQLHHSGDMVFTPESGLQLRLNEKLGTTAATELKKLDFKVSSTSNNLISTIPSDNLAAGTDNTSSLGPPSMPVHYDSQLDTTLFGKKSSPLTESGGPLSLSEENNDSKLLESGLMNSQESSWGKNVSSTESGRLFKGKRAHGPALLTKDNALFKVSISLLKTNKTSNNSATNRKTHIDGPSLLIENSPSVWQNILESDTEFKKVTPLIHDRMLMDKNATALRLNHMSNKTTSSKNMEMVQQKKEGPIPPDAQNPDMSFFKMLFLPESARWIQRTHGKNSLNSGQGPSPKQLVSLGPEKSVEGQNFLSEKNKVVVGKGEFTKDVGLKEMVFPSSRNLFLTNLDNLHENNTHNQEKKIQEEIEKKETLIQENVVLPQIHTVTGTKNFMKNLFLLSTRQNVEGSYDGAYAPVLQDFRSLNDSTNRTKKHTAHFSKKGEEENLEGLGNQTKQIVEKYACTTRISPNTSQQNFVTQRSKRALKQFRLPLEETELEKRIIVDDTSTQWSKNMKHLTPSTLTQIDYNEKEKGAITQSPLSDCLTRSHSIPQANRSPLPIAKVSSFPSIRPIYLTRVLFQDNSSHLPAASYRKKDSGVQESSHFLQGAKKNNLSLAILTLEMTGDQREVGSLGTSATNSVTYKKVENTVLPKPDLPKTSGKVELLPKVHIYQKDLFPTETSNGSPGHLDLVEGSLLQGTEGAIKWNEANRPGKVPFLRVATESSAKTPSKLLDPLAWDNHYGTQIPKEEWKSQEKSPEKTAFKKKDTILSLNACESNHAIAAINEGQNKPEIEVTWAKQGRTERLCSQNPPVLKRHQREITRTTLQSDQEEIDYDDTISVEMKKEDFDIYDEDENQSPRSFQKKTRHYFIAAVERLWDYGMSSSPHVLRNRAQSGSVPQFKKVVFQEFTDGSFTQPLYRGELNEHLGLLGPYIRAEVEDNIMVTFRNQASRPYSFYSSLISYEEDQRQGAEPRKNFVKPNETKTYFWKVQHHMAPTKDEFDCKAWAYFSDVDLEKDVHSGLIGPLLVCHTNTLNPAHGRQVTVQEFALFFTIFDETKSWYFTENMERNCRAPCNIQMEDPTFKENYRFHAINGYIMDTLPGLVMAQDQRIRWYLLSMGSNENIHSIHFSGHVFTVRKKEEYKMALYNLYPGVFETVEMLPSKAGIWRVECLIGEHLHAGMSTLFLVYSNKCQTPLGMASGHIRDFQITASGQYGQWAPKLARLHYSGSINAWSTKEPFSWIKVDLLAPMIIHGIKTQGARQKFSSLYISQFIIMYSLDGKKWQTYRGNSTGTLMVFFGNVDSSGIKHNIFNPPIIARYIRLHPTHYSIRSTLRMELMGCDLNSCSMPLGMESKAISDAQITASSYFTNMFATWSPSKARLHLQGRSNAWRPQVNNPKEWLQVDFQKTMKVTGVTTQGVKSLLTSMYVKEFLISSSQDGHQWTLFFQNGKVKVFQGNQDSFTPVVNSLDPPLLTRYLRIHPQSWVHQIALRMEVLGCEAQDLYGAPLGLRLRGGSEPATSGSETPGTSESATPESGPGSEPATSGSETPGSPAGSPTSTEEGTSTEPSEGSAPGSEPATSGSETPGSEPATSGSETPGSEPATSGSETPGTSTEPSEGSAPGTSESATPESGPGSEPATSGSETPGTSTEPSEGSAP

SEQ ID NO: 934 - protein, 3369 aa, Artificial Sequence
  Description of Artificial Sequence: Synthetic polypeptide
  MOD_RES (2924)..(2926): Any amino acid
  MOD_RES (2937)..(2940): Any amino acid
GTSTPESGSASPGTSPSGESSTAPGTSPSGESSTAPGSTSSTAESPGPGSTSESPSGTAPGSTSSTAESPGPGTSPSGESSTAPGTSTPESGSASPGSTSSTAESPGPGTSPSGESSTAPGTSPSGESSTAPGTSPSGESSTAPGTMTRIVGGATRRYYLGAVELSWDYMQSDLGELPVDARFPPRVPKSFPFNTSVVYKKTLFVEFTDHLFNIAKPRPPWMGLLGPTIQAEVYDTVVITLKNMASHPVSLHAVGVSYWKASEGAEYDDQTSQREKEDDKVFPGGSHTYVWQVLKENGPMASDPLCLTYSYLSHVDLVKDLNSGLIGALLVCREGSLAKEKTQTLHKFILLFAVFDEGKSWHSETKNSLMQDRDAASARAWPKMHTVNGYVNRSLPGLIGCHRKSVYWHVIGMGTTPEVHSIFLEGHTFLVRNHRQASLEISPITFLTAQTLLMDLGQFLLFCHISSHQHDGMEAYVKVDSCPEEPQLRMKNNEEAEDYDDDLTDSEMDVVRFDDDNSPSFIQIRSVAKKHPKTWVHYIAAEEEDWDYAPLVLAPDDRSYKSQYLNNGPQRIGRKYKKVRFMAYTDETFKTREAIQHESGILGPLLYGEVGDTLLIIFKNQASRPYNIYPHGITDVRPLYSRRLPKGVKHLKDFPILPGEIFKYKWTVTVEDGPTKSDPRCLTRYYSSFVNMERDLASGLIGPLLICYKESVDQRGNQIMSDKRNVILFSVFDENRSWYLTENIQRFLPNPAGVQLEDPEFQASNIMHSINGYVFDSLQLSVCLHEVAYWYILSIGAQTDFLSVFFSGYTFKHKMVYEDTLTLFPFSGETVFMSMENPGLWILGCHNSDFRNRGMTALLKVSSCDKNTGDYYEDSYEDISAYLLSKNNAIEPRSFSQNSRHPSTRQKQFNATTIPENDIEKTDPWFAHRTPMPKIQNVSSSDLLMLLRQSPTPHGLSLSDLQEAKYETFSDDPSPGAIDSNNSLSEMTHFRPQLHHSGDMVFTPESGLQLRLNEKLGTTAATELKKLDFKVSSTSNNLISTIPSDNLAAGTDNTSSLGPPSMPVHYDSQLDTTLFGKKSSPLTESGGPLSLSEENNDSKLLESGLMNSQESSWGKNVSSTESGRLFKGKRAHGPALLTKDNALFKVSISLLKTNKTSNNSATNRKTHIDGPSLLIENSPSVWQNILESDTEFKKVTPLIHDRMLMDKNATALRLNHMSNKTTSSKNMEMVQQKKEGPIPPDAQNPDMSFFKMLFLPESARWIQRTHGKNSLNSGQGPSPKQLVSLGPEKSVEGQNFLSEKNKVVVGKGEFTKDVGLKEMVFPSSRNLFLTNLDNLHENNTHNQEKKIQEEIEKKETLIQENVVLPQIHTVTGTKNFMKNLFLLSTRQNVEGSYDGAYAPVLQDFRSLNDSTNRTKKHTAHFSKKGEEENLEGLGNQTKQIVEKYACTTRISPNTSQQNFVTQRSKRALKQFRLPLEETELEKRIIVDDTSTQWSKNMKHLTPSTLTQIDYNEKEKGAITQSPLSDCLTRSHSIPQANRSPLPIAKVSSFPSIRPIYLTRVLFQDNSSHLPAASYRKKDSGVQESSHFLQGAKKNNLSLAILTLEMTGDQREVGSLGTSATNSVTYKKVENTVLPKPDLPKTSGKVELLPKVHIYQKDLFPTETSNGSPGHLDLVEGSLLQGTEGAIKWNEANRPGKVPFLRVATESSAKTPSKLLDPLAWDNHYGTQIPKEEWKSQEKSPEKTAFKKKDTILSLNACESNHAIAAINEGQNKPEIEVTWAKQGRTERLCSQNPPVLKRHQREITRTTLQSDQEEIDYDDTISVEMKKEDFDIYDEDENQSPRSFQKKTRHYFIAAVERLWDYGMSSSPHVLRNRAQSGSVPQFKKVVFQEFTDGSFTQPLYRGELNEHLGLLGPYIRAEVEDNIMVTFRNQASRPYSFYSSLISYEEDQRQGAEPRKNFVKPNETKTYFWKVQHHMAPTKDEFDCKAWAYFSDVDLEKDVHSGLIGPLLVCHTNTLNPAHGRQVTVQEFALFFTIFDETKSWYFTENMERNCRAPCNIQMEDPTFKENYRFHAINGYIMDTLPGLVMAQDQRIRWYLLSMGSNENIHSIHFSGHVFTVRKKEEYKMALYNLYPGVFETVEMLPSKAGIWRVECLIGEHLHAGMSTLFLVYSNKCQTPLGMASGHIRDFQITASGQYGQWAPKLARLHYSGSINAWSTKEPFSWIKVDLLAPMIIHGIKTQGARQKFSSLYISQFIIMYSLDGKKWQTYRGNSTGTLMVFFGNVDSSGIKHNIFNPPIIARYIRLHPTHYSIRSTLRMELMGCDLNSCSMPLGMESKAISDAQITASSYFTNMFATWSPSKARLHLQGRSNAWRPQVNNPKEWLQVDFQKTMKVTGVTTQGVKSLLTSMYVKEFLISSSQDGHQWTLFFQNGKVKVFQGNQDSFTPVVNSLDPPLLTRYLRIHPQSWVHQIALRMEVLGCEAQDLYGTMTRIVGGGSTSESPSGTAPGTSPSGESSTAPGSTSESPSGTAPGSTSESPSGTAPGTSTPESGSASPGTSTPESGSASPGSTSESPSGTAPGSTSESPSGTAPGTSPSGESSTAPGSTSESPSGTAPGTSPSGESSTAPGTSPSGESSTAPGSTSSTAESPGPGTSPSGESSTAPGTSPSGESSTAPGSTSSTAESPGPGTSTPESGSASPGTSTPESGSASPGSTSESPSGTAPGSTSESPSGTAPGTSTPESGSASPGSTSSTAESPGPGTSTPESGSASPGSTSESPSGTAPGTSPSGESSTAPGSTSSTAESPGPGTSPSGESSTAPGTSTPESGSASPGSTSSTAESPGPGSTSSTAESPGPGSTSSTAESPGPGSTSSTAESPGPGTSPSGESSTAPGSTSESPSGTAPGSTSESPSGTAPGTSTPESGPXXXGASASGAPSTXXXXSESPSGTAPGSTSESPSGTAPGSTSESPSGTAPGSTSESPSGTAPGSTSESPSGTAPGSTSESPSGTAPGTSTPESGSASPGTSPSGESSTAPGTSPSGESSTAPGSTSSTAESPGPGTSPSGESSTAPGTSTPESGSASPGSTSESPSGTAPGSTSESPSGTAPGTSPSGESSTAPGSTSESPSGTAPGTSTPESGSASPGTSTPESGSASPGSTSESPSGTAPGTSTPESGSASPGSTSSTAESPGPGSTSESPSGTAPGSTSESPSGTAPGTSPSGESSTAPGSTSSTAESPGPGTSPSGESSTAPGTSTPESGSASPGTSPSGESSTAPGTSPSGESSTAPGTSPSGESSTAPGSTSSTAESPGPGSTSSTAESPGPGTSPSGESSTAPGSSPSASTGTGPGSSTPSGATGSPGSSTPSGATGSP

SEQ ID NO: 935 - protein, 3350 aa, Artificial Sequence
  Description of Artificial Sequence: Synthetic polypeptide
GSPAGSPTSTEEGTSESATPESGPGTSTEPSEGSAPGSPAGSPTSTEEGTSTEPSEGSAPGTSTEPSEGSAPGTSESATPESGPGSEPATSGSETPGSEPATSGSETPGSPAGSPTSTEEGTSESATPESGPGTSTEPSEGSAPGTSTEPSEGSAPGSPAGSPTSTEEGTSTEPSEGSAPGTSTEPSEGSAPGTSESATPESGPGTSTEPSEGSAPGTSESATPESGPGSEPATSGSETPGTSTEPSEGSAPGTSTEPSEGSAPGTSESATPESGPGTSESATPESGPGSPAGSPTSTEEGTSESATPESGPGSEPATSGSETPGTSESATPESGPGTSTEPSEGSAPGTSTEPSEGSAPGTSTEPSEGSAPGTSTEPSEGSAPGTSTEPSEGSAPGTSTEPSEGSAPGSPAGSPTSTEEGTSTEPSEGSAPGTSESATPESGPGSEPATSGSETPGTSESATPESGPGSEPATSGSETPGTSESATPESGPGTSTEPSEGSAPGTSESATPESGPGSPAGSPTSTEEGSPAGSPTSTEEGSPAGSPTSTEEGTSESATPESGPGTSTEPSEGSAPGTSESATPESGPGSEPATSGSETPGTSESATPESGPGSEPATSGSETPGTSESATPESGPGTSTEPSEGSAPGSPAGSPTSTEEGTSESATPESGPGSEPATSGSETPGTSESATPESGPGSPAGSPTSTEEGSPAGSPTSTEEGTSTEPSEGSAPGTSESATPESGPGTSESATPESGPGTSESATPESGPGSEPATSGSETPGSEPATSGSETPGSPAGSPTSTEEGTSTEPSEGSAPGTSTEPSEGSAPGSEPATSGSETPGTSESATPESGPGTSTEPSEGSAPGATRRYYLGAVELSWDYMQSDLGELPVDARFPPRVPKSFPFNTSVVYKKTLFVEFTDHLFNIAKPRPPWMGLLGPTIQAEVYDTVVITLKNMASHPVSLHAVGVSYWKASEGAEYDDQTSQREKEDDKVFPGGSHTYVWQVLKENGPMASDPLCLTYSYLSHVDLVKDLNSGLIGALLVCREGSLAKEKTQTLHKFILLFAVFDEGKSWHSETKNSLMQDRDAASARAWPKMHTVNGYVNRSLPGLIGCHRKSVYWHVIGMGTTPEVHSIFLEGHTFLVRNHRQASLEISPITFLTAQTLLMDLGQFLLFCHISSHQHDGMEAYVKVDSCPEEPQLRMKNNEEAEDYDDDLTDSEMDVVRFDDDNSPSFIQIRSVAKKHPKTWVHYIAAEEEDWDYAPLVLAPDDRSYKSQYLNNGPQRIGRKYKKVRFMAYTDETFKTREAIQHESGILGPLLYGEVGDTLLIIFKNQASRPYNIYPHGITDVRPLYSRRLPKGVKHLKDFPILPGEIFKYKWTVTVEDGPTKSDPRCLTRYYSSFVNMERDLASGLIGPLLICYKESVDQRGNQIMSDKRNVILFSVFDENRSWYLTENIQRFLPNPAGVQLEDPEFQASNIMHSINGYVFDSLQLSVCLHEVAYWYILSIGAQTDFLSVFFSGYTFKHKMVYEDTLTLFPFSGETVFMSMENPGLWILGCHNSDFRNRGMTALLKVSSCDKNTGDYYEDSYEDISAYLLSKNNAIEPRSFSQNSRHPSTRQKQFNATTIPENDIEKTDPWFAHRTPMPKIQNVSSSDLLMLLRQSPTPHGLSLSDLQEAKYETFSDDPSPGAIDSNNSLSEMTHFRPQLHHSGDMVFTPESGLQLRLNEKLGTTAATELKKLDFKVSSTSNNLISTIPSDNLAAGTDNTSSLGPPSMPVHYDSQLDTTLFGKKSSPLTESGGPLSLSEENNDSKLLESGLMNSQESSWGKNVSSTESGRLFKGKRAHGPALLTKDNALFKVSISLLKTNKTSNNSATNRKTHIDGPSLLIENSPSVWQNILESDTEFKKVTPLIHDRMLMDKNATALRLNHMSNKTTSSKNMEMVQQKKEGPIPPDAQNPDMSFFKMLFLPESARWIQRTHGKNSLNSGQGPSPKQLVSLGPEKSVEGQNFLSEKNKVVVGKGEFTKDVGLKEMVFPSSRNLFLTNLDNLHENNTHNQEKKIQEEIEKKETLIQENVVLPQIHTVTGTKNFMKNLFLLSTRQNVEGSYDGAYAPVLQDFRSLNDSTNRTKKHTAHFSKKGEEENLEGLGNQTKQIVEKYACTTRISPNTSQQNFVTQRSKRALKQFRLPLEETELEKRIIVDDTSTQWSKNMKHLTPSTLTQIDYNEKEKGAITQSPLSDCLTRSHSIPQANRSPLPIAKVSSFPSIRPIYLTRVLFQDNSSHLPAASYRKKDSGVQESSHFLQGAKKNNLSLAILTLEMTGDQREVGSLGTSATNSVTYKKVENTVLPKPDLPKTSGKVELLPKVHIYQKDLFPTETSNGSPGHLDLVEGSLLQGTEGAIKWNEANRPGKVPFLRVATESSAKTPSKLLDPLAWDNHYGTQIPKEEWKSQEKSPEKTAFKKKDTILSLNACESNHAIAAINEGQNKPEIEVTWAKQGRTERLCSQNPPVLKRHQREITRTTLQSDQEEIDYDDTISVEMKKEDFDIYDEDENQSPRSFQKKTRHYFIAAVERLWDYGMSSSPHVLRNRAQSGSVPQFKKVVFQEFTDGSFTQPLYRGELNEHLGLLGPYIRAEVEDNIMVTFRNQASRPYSFYSSLISYEEDQRQGAEPRKNFVKPNETKTYFWKVQHHMAPTKDEFDCKAWAYFSDVDLEKDVHSGLIGPLLVCHTNTLNPAHGRQVTVQEFALFFTIFDETKSWYFTENMERNCRAPCNIQMEDPTFKENYRFHAINGYIMDTLPGLVMAQDQRIRWYLLSMGSNENIHSIHFSGHVFTVRKKEEYKMALYNLYPGVFETVEMLPSKAGIWRVECLIGEHLHAGMSTLFLVYSNKCQTPLGMASGHIRDFQITASGQYGQWAPKLARLHYSGSINAWSTKEPFSWIKVDLLAPMIIHGIKTQGARQKFSSLYISQFIIMYSLDGKKWQTYRGNSTGTLMVFFGNVDSSGIKHNIFNPPIIARYIRLHPTHYSIRSTLRMELMGCDLNSCSMPLGMESKAISDAQITASSYFTNMFATWSPSKARLHLQGRSNAWRPQVNNPKEWLQVDFQKTMKVTGVTTQGVKSLLTSMYVKEFLISSSQDGHQWTLFFQNGKVKVFQGNQDSFTPVVNSLDPPLLTRYLRIHPQSWVHQIALRMEVLGCEAQDLYGKLTRAETGGSEPATSGSETPGTSESATPESGPGSEPATSGSETPGSPAGSPTSTEEGTSTEPSEGSAPGSEPATSGSETPGSEPATSGSETPGSEPATSGSETPGTSTEPSEGSAPGTSESATPESGPGSEPATSGSETPGTSTEPSEGSAP

SEQ ID NO: 936 - protein, 2456 aa, Artificial Sequence; identical to SEQ ID NO: 931
  Description of Artificial Sequence: Synthetic polypeptide

SEQ ID NO: 937 - protein, 2361 aa, Artificial Sequence
  Description of Artificial Sequence: Synthetic polypeptide
MAEPAGSPTSTEEGTPGSGTASSSPGSSTPSGATGSPGASPGTSSTGSPGKLTRAETGATRRYYLGAVELSWDYMQSDLGELPVDARFPPRVPKSFPFNTSVVYKKTLFVEFTDHLFNIAKPRPPWMGLLGPTIQAEVYDTVVITLKNMASHPVSLHAVGVSYWKASEGAEYDDQTSQREKEDDKVFPGGSHTYVWQVLKENGPMASDPLCLTYSYLSHVDLVKDLNSGLIGALLVCREGSLAKEKTQTLHKFILLFAVFDEGKSWHSETKNSLMQDRDAASARAWPKMHTVNGYVNRSLPGLIGCHRKSVYWHVIGMGTTPEVHSIFLEGHTFLVRNHRQASLEISPITFLTAQTLLMDLGQFLLFCHISSHQHDGMEAYVKVDSCPEEPQLRMKNNEEAEDYDDDLTDSEMDVVRFDDDNSPSFIQIRSVAKKHPKTWVHYIAAEEEDWDYAPLVLAPDDRSYKSQYLNNGPQRIGRKYKKVRFMAYTDETFKTREAIQHESGILGPLLYGEVGDTLLIIFKNQASRPYNIYPHGITDVRPLYSRRLPKGVKHLKDFPILPGEIFKYKWTVTVEDGPTKSDPRCLTRYYSSFVNMERDLASGLIGPLLICYKESVDQRGNQIMSDKRNVILFSVFDENRSWYLTENIQRFLPNPAGVQLEDPEFQASNIMHSINGYVFDSLQLSVCLHEVAYWYILSIGAQTDFLSVFFSGYTFKHKMVYEDTLTLFPFSGETVFMSMENPGLWILGCHNSDFRNRGMTALLKVSSCDKNTGDYYEDSYEDISAYLLSKNNAIEPRSFSQNPPVLKRHQREITRTTLQSDQEEIDYDDTISVEMKKEDFDIYDEDENQSPRSFQKKTRHYFIAAVERLWDYGMSSSPHVLRNRAQSGSVPQFKKVVFQEFTDGSFTQPLYRGELNEHLGLLGPYIRAEVEDNIMVTFRNQASRPYSFYSSLISYEEDQRQGAEPRKNFVKPNETKTYFWKVQHHMAPTKDEFDCKAWAYFSDVDLEKDVHSGLIGPLLVCHTNTLNPAHGRQVTVQEFALFFTIFDETKSWYFTENMERNCRAPCNIQMEDPTFKENYRFHAINGYIMDTLPGLVMAQDQRIRWYLLSMGSNENIHSIHFSGHVFTVRKKEEYKMALYNLYPGVFETVEMLPSKAGIWRVECLIGEHLHAGMSTLFLVYSNKCQTPLGMASGHIRDFQITASGQYGQWAPKLARLHYSGSINAWSTKEPFSWIKVDLLAPMIIHGIKTQGARQKFSSLYISQFIIMYSLDGKKWQTYRGNSTGTLMVFFGNVDSSGIKHNIFNPPIIARYIRLHPTHYSIRSTLRMELMGCDLNSCSMPLGMESKAISDAQITASSYFTNMFATWSPSKARLHLQGRSNAWRPQVNNPKEWLQVDFQKTMKVTGVTTQGVKSLLTSMYVKEFLISSSQDGHQWTLFFQNGKVKVFQGNQDSFTPVVNSLDPPLLTRYLRIHPQSWVHQIALRMEVLGCEAQDLYGGSPAGSPTSTEEGTSESATPESGPGTSTEPSEGSAPGSPAGSPTSTEEGTSTEPSEGSAPGTSTEPSEGSAPGTSESATPESGPGSEPATSGSETPGSEPATSGSETPGSPAGSPTSTEEGTSESATPESGPGTSTEPSEGSAPGTSTEPSEGSAPGSPAGSPTSTEEGTSTEPSEGSAPGTSTEPSEGSAPGTSESATPESGPGTSTEPSEGSAPGTSESATPESGPGSEPATSGSETPGTSTEPSEGSAPGTSTEPSEGSAPGTSESATPESGPGTSESATPESGPGSPAGSPTSTEEGTSESATPESGPGSEPATSGSETPGTSESATPESGPGTSTEPSEGSAPGTSTEPSEGSAPGTSTEPSEGSAPGTSTEPSEGSAPGTSTEPSEGSAPGTSTEPSEGSAPGSPAGSPTSTEEGTSTEPSEGSAPGTSESATPESGPGSEPATSGSETPGTSESATPESGPGSEPATSGSETPGTSESATPESGPGTSTEPSEGSAPGTSESATPESGPGSPAGSPTSTEEGSPAGSPTSTEEGSPAGSPTSTEEGTSESATPESGPGTSTEPSEGSAPGTSESATPESGPGSEPATSGSETPGTSESATPESGPGSEPATSGSETPGTSESATPESGPGTSTEPSEGSAPGSPAGSPTSTEEGTSESATPESGPGSEPATSGSETPGTSESATPESGPGSPAGSPTSTEEGSPAGSPTSTEEGTSTEPSEGSAPGTSESATPESGPGTSESATPESGPGTSESATPESGPGSEPATSGSETPGSEPATSGSETPGSPAGSPTSTEEGTSTEPSEGSAPGTSTEPSEGSAPGSEPATSGSETPGTSESATPESGPGTSTEPSEGSAP

SEQ ID NO: 938 - protein, 1734 aa, Artificial Sequence
  Description of Artificial Sequence: Synthetic polypeptide
ATRRYYLGAVELSWDYMQSDLGELPVDARFPPRVPKSFPFNTSVVYKKTLFVEFTDHLFNIAKPRPPWMGLLGPTIQAEVYDTVVITLKNMASHPVSLHAVGVSYWKASEGAEYDDQTSQREKEDDKVFPGGSHTYVWQVLKENGPMASDPLCLTYSYLSHVDLVKDLNSGLIGALLVCREGSLAKEKTQTLHKFILLFAVFDEGKSWHSETKNSLMQDRDAASARAWPKMHTVNGYVNRSLPGLIGCHRKSVYWHVIGMGTTPEVHSIFLEGHTFLVRNHRQASLEISPITFLTAQTLLMDLGQFLLFCHISSHQHDGMEAYVKVDSCPEEPQLRMKNNEEAEDYDDDLTDSEMDVVRFDDDNSPSFIQIRSVAKKHPKTWVHYIAAEEEDWDYAPLVLAPDDRSYKSQYLNNGPQRIGRKYKKVRFMAYTDETFKTREAIQHESGILGPLLYGEVGDTLLIIFKNQASRPYNIYPHGITDVRPLYSRRLPKGVKHLKDFPILPGEIFKYKWTVTVEDGPTKSDPRCLTRYYSSFVNMERDLASGLIGPLLICYKESVDQRGNQIMSDKRNVILFSVFDENRSWYLTENIQRFLPNPAGVQLEDPEFQASNIMHSINGYVFDSLQLSVCLHEVAYWYILSIGAQTDFLSVFFSGYTFKHKMVYEDTLTLFPFSGETVFMSMENPGLWILGCHNSDFRNRGMTALLKVSSCDKNTGDYYEDSYEDISAYLLSKNNAIEPRSFSQNPPVLKRHQREITRTTLQSDQEEIDYDDTISVEMKKEDFDIYDEDENQSPRSFQKKTRHYFIAAVERLWDYGMSSSPHVLRNRAQSGSVPQFKKVVFQEFTDGSFTQPLYRGELNEHLGLLGPYIRAEVEDNIMVTFRNQASRPYSFYSSLISYEEDQRQGAEPRKNFVKPNETKTYFWKVQHHMAPTKDEFDCKAWAYFSDVDLEKDVHSGLIGPLLVCHTNTLNPAHGRQVTVQEFALFFTIFDETKSWYFTENMERNCRAPCNIQMEDPTFKENYRFHAINGYIMDTLPGLVMAQDQRIRWYLLSMGSNENIHSIHFSGHVFTVRKKEEYKMALYNLYPGVFETVEMLPSKAGIWRVECLIGEHLHAGMSTLFLVYSNKCQTPLGMASGHIRDFQITASGQYGQWAPKLARLHYSGSINAWSTKEPFSWIKVDLLAPMIIHGIKTQGARQKFSSLYISQFIIMYSLDGKKWQTYRGNSTGTLMVFFGNVDSSGIKHNIFNPPIIARYIRLHPTHYSIRSTLRMELMGCDLNSCSMPLGMESKAISDAQITASSYFTNMFATWSPSKARLHLQGRSNAWRPQVNNPKEWLQVDFQKTMKVTGVTTQGVKSLLTSMYVKEFLISSSQDGHQWTLFFQNGKVKVFQGNQDSFTPVVNSLDPPLLTRYLRIHPQSWVHQIALRMEVLGCEAQDLYKLTRAETGPGASPGTSSTGSPGASPGTSSTGSPGTPGSGTASSSPGSSTPSGATGSPGTPGSGTASSSPGSSTPSGATGSPGTPGSGTASSSPGSSTPSGATGSPGSSTPSGATGSPGSSPSASTGTGPGSSPSASTGTGPGASPGTSSTGSPGTPGSGTASSSPGSSTPSGATGSPGSSPSASTGTGPGSSPSASTGTGPGASPGTSSTGSPGASPGTSSTGSPGSSTPSGATGSPGSSPSASTGTGPGASPGTSSTGSPGSSPSASTGTGPGTPGSGTASSSPGSSTPSGATGS

SEQ ID NO: 939 - protein, 2310 aa, Artificial Sequence [sequence omitted]

SEQ ID NO: 940 - protein, 2599 aa, Artificial Sequence
  Description of Artificial Sequence: Synthetic polypeptide
ATRRYYLGAVELSWDYMQSDLGELPVDARFPPRVPKSFPFNTSVVYKKTLFVEFTDHLFNIAKPRPPWMGLLGPTIQAEVYDTVVITLKNMASHPVSLHAVGVSYWKASEGAEYDDQTSQREKEDDKVFPGGSHTYVWQVLKENGPMASDPLCLTYSYLSHVDLVKDLNSGLIGALLVCREGSLAKEKTQTLHKFILLFAVFDEGKSWHSETKNSLMQDRDAASARAWPKMHTVNGYVNRSLPGLIGCHRKSVYWHVIGMGTTPEVHSIFLEGHTFLVRNHRQASLEISPITFLTAQTLLMDLGQFLLFCHISSHQHDGMEAYVKVDSCPEEPQLRMKNNEEAEDYDDDLTDSEMDVVRFDDDNSPSFIQIRSVAKKHPKTWVHYIAAEEEDWDYAPLVLAPDDRSYKSQYLNNGPQRIGRKYKKVRFMAYTDETFKTREAIQHESGILGPLLYGEVGDTLLIIFKNQASRPYNIYPHGITDVRPLYSRRLPKGVKHLKDFPILPGEIFKYKWTVTVEDGPTKSDPRCLTRYYSSFVNMERDLASGLIGPLLICYKESVDQRGNQIMSDKRNVILFSVFDENRSWYLTENIQRFLPNPAGVQLEDPEFQASNIMHSINGYVFDSLQLSVCLHEVAYWYILSIGAQTDFLSVFFSGYTFKHKMVYEDTLTLFPFSGETVFMSMENPGLWILGCHNSDFRNRGMTALLKVSSCDKNTGDYYEDSYEDISAYLLSKNNAIEPRSFSQNGPGASPGTSSTGSPGASPGTSSTGSPGTPGSGTASSSPGSSTPSGATGSPGTPGSGTASSSPGSSTPSGATGSPGTPGSGTASSSPGSSTPSGATGSPGSSTPSGATGSPGSSPSASTGTGPGSSPSASTGTGPGASPGTSSTGSPGTPGSGTASSSPGSSTPSGATGSPGSSPSASTGTGPGSSPSASTGTGPGASPGTSSTGSPGASPGTSSTGSPGSSTPSGATGSPGSSPSASTGTGPGASPGTSSTGSPGSSPSASTGTGPGTPGSGTASSSPGSSTPSGATGSPPVLKRHQREITRTTLQSDQEEIDYDDTISVEMKKEDFDIYDEDENQSPRSFQKKTRHYFIAAVERLWDYGMSSSPHVLRNRAQSGSVPQFKKVVFQEFTDGSFTQPLYRGELNEHLGLLGPYIRAEVEDNIMVTFRNQASRPYSFYSSLISYEEDQRQGAEPRKNFVKPNETKTYFWKVQHHMAPTKDEFDCKAWAYFSDVDLEKDVHSGLIGPLLVCHTNTLNPAHGRQVTVQEFALFFTIFDETKSWYFTENMERNCRAPCNIQMEDPTFKENYRFHAINGYIMDTLPGLVMAQDQRIRWYLLSMGSNENIHSIHFSGHVFTVRKKEEYKMALYNLYPGVFETVEMLPSKAGIWRVECLIGEHLHAGMSTLFLVYSNKCQTPLGMASGHIRDFQITASGQYGQWAPKLARLHYSGSINAWSTKEPFSWIKVDLLAPMIIHGIKTQGARQKFSSLYISQFIIMYSLDGKKWQTYRGNSTGTLMVFFGNVDSSGIKHNIFNPPIIARYIRLHPTHYSIRSTLRMELMGCDLNSCSMPLGMESKAISDAQITASSYFTNMFATWSPSKARLHLQGRSNAWRPQVNNPKEWLQVDFQKTMKVTGVTTQGVKSLLTSMYVKEFLISSSQDGHQWTLFFQNGKVKVFQGNQDSFTPVVNSLDPPLLTRYLRIHPQSWVHQIALRMEVLGCEAQDLYKLTRAETGGASPGTSSTGSPGSSPSASTGTGPGSSPSASTGTGPGTPGSGTASSSPGSSTPSGATGSPGSSPSASTGTGPGASPGTSSTGSPGTPGSGTASSSPGSSTPSGATGSPGTPGSGTASSSPGASPGTSSTGSPGASPGTSSTGSPGTPGSGTASSSPGSSTPSGATGSPGASPGTSSTGSPGTPGSGTASSSPGSSTPSGATGSPGSSPSASTGTGPGSSPSASTGTGPGSSTPSGATGSPGSSTPSGATGSPGASPGTSSTGSPGASPGTSSTGSPGASPGTSSTGSPGTPGSGTASSSPGASPGTSSTGSPGASPGTSSTGSPGASPGTSSTGSPGSSPSASTGTGPGTPGSGTASSSPGASPGTSSTGSPGASPGTSSTGSPGASPGTSSTGSPGSSTPSGATGSPGSSTPSGATGSPGASPGTSSTGSPGTPGSGTASSSPGSSTPSGATGSPGSSTPSGATGSPGSSTPSGATGSPGSSPSASTGTGPGASPGTSSTGSPGASPGTSSTGSPGTPGSGTASSSPGASPGTSSTGSPGASPGTSSTGSPGASPGTSSTGSPGASPGTSSTGSPGTPGSGTASSSPGSSTPSGATGSPGTPGSGTASSSPGSSTPSGATGSPGTPGSGTASSSPGSSTPSGATGSPGSSTPSGATGSPGSSPSASTGTGPGSSPSASTGTGPGASPGTSSTGSPGTPGSGTASSSPGSSTPSGATGSPGSSPSASTGTGPGSSPSASTGTGPGASPGTSSTGSPGASPGTSSTGSPGSSTPSGATGSPGSSPSASTGTGPGASPGTSSTGSPGSSPSASTGTGPGTPGSGTASSSPGSSTPSGATGSPGSSTPSGATGSPGASPGTSSTGSP

SEQ ID NO: 941 - protein, 2599 aa, Artificial Sequence
  Description of Artificial Sequence: Synthetic polypeptide
ATRRYYLGAVELSWDYMQSDLGELPVDARFPPRVPKSFPFNTSVVYKKTLFVEFTDHLFNIAKPRPPWMGLLGPTIQAEVYDTVVITLKNMASHPVSLHAVGVSYWKASEGAEYDDQTSQREKEDDKVFPGGSHTYVWQVLKENGPMASDPLCLTYSYLSHVDLVKDLNSGLIGALLVCREGSLAKEKTQTLHKFILLFAVFDEGKSWHSETKNSLMQDRDAASARAWPKMHTVNGYVNRSLPGLIGCHRKSVYWHVIGMGTTPEVHSIFLEGHTFLVRNHRQASLEISPITFLTAQTLLMDLGQFLLFCHISSHQHDGMEAYVKVDSCPEEPQLRMKNNEEAEDYDDDLTDSEMDVVRFDDDNSPSFIQIRSVAKKHPKTWVHYIAAEEEDWDYAPLVLAPDDRSYKSQYLNNGPQRIGRKYKKVRFMAYTDETFKTREAIQHESGILGPLLYGEVGDTLLIIFKNQASRPYNIYPHGITDVRPLYSRRLPKGVKHLKDFPILPGEIFKYKWTVTVEDGPTKSDPRCLTRYYSSFVNMERDLASGLIGPLLICYKESVDQRGNQIMSDKRNVILFSVFDENRSWYLTENIQRFLPNPAGVQLEDPEFQASNIMHSINGYVFDSLQLSVCLHEVAYWYILSIGAQTDFLSVFFSGYTFKHKMVYEDTLTLFPFSGETVFMSMENPGLWILGCHNSDFRNRGMTALLKVSSCDKNTGDYYEDSYEDISAYLLSKNNAIEPRSFSGPGASPGTSSTGSPGASPGTSSTGSPGTPGSGTASSSPGSSTPSGATGSPGTPGSGTASSSPGSSTPSGATGSPGTPGSGTASSSPGSSTPSGATGSPGSSTPSGATGSPGSSPSASTGTGPGSSPSASTGTGPGASPGTSSTGSPGTPGSGTASSSPGSSTPSGATGSPGSSPSASTGTGPGSSPSASTGTGPGASPGTSSTGSPGASPGTSSTGSPGSSTPSGATGSPGSSPSASTGTGPGASPGTSSTGSPGSSPSASTGTGPGTPGSGTASSSPGSSTPSGATGSQNPPVLKRHQREITRTTLQSDQEEIDYDDTISVEMKKEDFDIYDEDENQSPRSFQKKTRHYFIAAVERLWDYGMSSSPHVLRNRAQSGSVPQFKKVVFQEFTDGSFTQPLYRGELNEHLGLLGPYIRAEVEDNIMVTFRNQASRPYSFYSSLISYEEDQRQGAEPRKNFVKPNETKTYFWKVQHHMAPTKDEFDCKAWAYFSDVDLEKDVHSGLIGPLLVCHTNTLNPAHGRQVTVQEFALFFTIFDETKSWYFTENMERNCRAPCNIQMEDPTFKENYRFHAINGYIMDTLPGLVMAQDQRIRWYLLSMGSNENIHSIHFSGHVFTVRKKEEYKMALYNLYPGVFETVEMLPSKAGIWRVECLIGEHLHAGMSTLFLVYSNKCQTPLGMASGHIRDFQITASGQYGQWAPKLARLHYSGSINAWSTKEPFSWIKVDLLAPMIIHGIKTQGARQKFSSLYISQFIIMYSLDGKKWQTYRGNSTGTLMVFFGNVDSSGIKHNIFNPPIIARYIRLHPTHYSIRSTLRMELMGCDLNSCSMPLGMESKAISDAQITASSYFTNMFATWSPSKARLHLQGRSNAWRPQVNNPKEWLQVDFQKTMKVTGVTTQGVKSLLTSMYVKEFLISSSQDGHQWTLFFQNGKVKVFQGNQDSFTPVVNSLDPPLLTRYLRIHPQSWVHQIALRMEVLGCEAQDLYKLTRAETGGASPGTSSTGSPGSSPSASTGTGPGSSPSASTGTGPGTPGSGTASSSPGSSTPSGATGSPGSSPSASTGTGPGASPGTSSTGSPGTPGSGTASSSPGSSTPSGATGSPGTPGSGTASSSPGASPGTSSTGSPGASPGTSSTGSPGTPGSGTASSSPGSSTPSGATGSPGASPGTSSTGSPGTPGSGTASSSPGSSTPSGATGSPGSSPSASTGTGPGSSPSASTGTGPGSSTPSGATGSPGSSTPSGATGSPGASPGTSSTGSPGASPGTSSTGSPGASPGTSSTGSPGTPGSGTASSSPGASPGTSSTGSPGASPGTSSTGSPGASPGTSSTGSPGSSPSASTGTGPGTPGSGTASSSPGASPGTSSTGSPGASPGTSSTGSPGASPGTSSTGSPGSSTPSGATGSPGSSTPSGATGSPGASPGTSSTGSPGTPGSGTASSSPGSSTPSGATGSPGSSTPSGATGSPGSSTPSGATGSPGSSPSASTGTGPGASPGTSSTGSPGASPGTSSTGSPGTPGSGTASSSPGASPGTSSTGSPGASPGTSSTGSPGASPGTSSTGSPGASPGTSSTGSPGTPGSGTASSSPGSSTPSGATGSPGTPGSGTASSSPGSSTPSGATGSPGTPGSGTASSSPGSSTPSGATGSPGSSTPSGATGSPGSSPSASTGTGPGSSPSASTGTGPGASPGTSSTGSPGTPGSGTASSSPGSSTPSGATGSPGSSPSASTGTGPGSSPSASTGTGPGASPGTSSTGSPGASPGTSSTGSPGSSTPSGATGSPGSSPSASTGTGPGASPGTSSTGSPGSSPSASTGTGPGTPGSGTASSSPGSSTPSGATGSPGSSTPSGATGSPGASPGTSSTGSP

SEQ ID NO: 942 - protein, 2599 aa, Artificial Sequence
  Description of Artificial Sequence: Synthetic polypeptide
ATRRYYLGAVELSWDYMQSDLGELPVDARFPPRVPKSFPFNTSVVYKKTLFVEFTDHLFNIAKPRPPWMGLLGPTIQAEVYDTVVITLKNMASHPVSLHAVGVSYWKASEGAEYDDQTSQREKEDDKVFPGGSHTYVWQVLKENGPMASDPLCLTYSYLSHVDLVKDLNSGLIGALLVCREGSLAKEKTQTLHKFILLFAVFDEGKSWHSETKNSLMQDRDAASARAWPKMHTVNGYVNRSLPGLIGCHRKSVYWHVIGMGTTPEVHSIFLEGHTFLVRNHRQASLEISPITFLTAQTLLMDLGQFLLFCHISSHQHDGMEAYVKVDSCPEEPQLRMKNNEEAEDYDDDLTDSEMDVVRFDDDNSPSFIQIRSVAKKHPKTWVHYIAAEEEDWDYAPLVLAPDDRSYKSQYLNNGPQRIGRKYKKVRFMAYTDETFKTREAIQHESGILGPLLYGEVGDTLLIIFKNQASRPYNIYPHGITDVRPLYSRRLPKGVKHLKDFPILPGEIFKYKWTVTVEDGPTKSDPRCLTRYYSSFVNMERDLASGLIGPLLICYKESVDQRGNQIMSDKRNVILFSVFDENRSWYLTENIQRFLPNPAGVQLEDPEFQASNIMHSINGYVFDSLQLSVCLHEVAYWYILSIGAQTDFLSVFFSGYTFKHKMVYEDTLTLFPFSGETVFMSMENPGLWILGCHNSDFRNRGMTALLKVSSCDKNTGDYYEDSYEDISAYLLSKNNAIEPRSFSQNGPGASPGTSSTGSPGASPGTSSTGSPGTPGSGTASSSPGSSTPSGATGSPGTPGSGTASSSPGSSTPSGATGSPGTPGSGTASSSPGSSTPSGATGSPGSSTPSGATGSPGSSPSASTGTGPGSSPSASTGTGPGASPGTSSTGSPGTPGSGTASSSPGSSTPSGATGSPGSSPSASTGTGPGSSPSASTGTGPGASPGTSSTGSPGASPGTSSTGSPGSSTPSGATGSPGSSPSASTGTGPGASPGTSSTGSPGSSPSASTGTGPGTPGSGTASSSPGSSTPSGATGSPPVLKRHQAEITRTTLQSDQEEIDYDDTISVEMKKEDFDIYDEDENQSPRSFQKKTRHYFIAAVERLWDYGMSSSPHVLRNRAQSGSVPQFKKVVFQEFTDGSFTQPLYRGELNEHLGLLGPYIRAEVEDNIMVTFRNQASRPYSFYSSLISYEEDQRQGAEPRKNFVKPNETKTYFWKVQHHMAPTKDEFDCKAWAYFSDVDLEKDVHSGLIGPLLVCHTNTLNPAHGRQVTVQEFALFFTIFDETKSWYFTENMERNCRAPCNIQMEDPTFKENYRFHAINGYIMDTLPGLVMAQDQRIRWYLLSMGSNENIHSIHFSGHVFTVRKKEEYKMALYNLYPGVFETVEMLPSKAGIWRVECLIGEHLHAGMSTLFLVYSNKCQTPLGMASGHIRDFQITASGQYGQWAPKLARLHYSGSINAWSTKEPFSWIKVDLLAPMIIHGIKTQGARQKFSSLYISQFIIMYSLDGKKWQTYRGNSTGTLMVFFGNVDSSGIKHNIFNPPIIARYIRLHPTHYSIRSTLRMELMGCDLNSCSMPLGMESKAISDAQITASSYFTNMFATWSPSKARLHLQGRSNAWRPQVNNPKEWLQVDFQKTMKVTGVTTQGVKSLLTSMYVKEFLISSSQDGHQWTLFFQNGKVKVFQGNQDSFTPVVNSLDPPLLTRYLRIHPQSWVHQIALRMEVLGCEAQDLYKLTRAETGGASPGTSSTGSPGSSPSASTGTGPGSSPSASTGTGPGTPGSGTASSSPGSSTPSGATGSPGSSPSASTGTGPGASPGTSSTGSPGTPGSGTASSSPGSSTPSGATGSPGTPGSGTASSSPGASPGTSSTGSPGASPGTSSTGSPGTPGSGTASSSPGSSTPSGATGSPGASPGTSSTGSPGTPGSGTASSSPGSSTPSGATGSPGSSPSASTGTGPGSSPSASTGTGPGSSTPSGATGSPGSSTPSGATGSPGASPGTSSTGSPGASPGTSSTGSPGASPGTSSTGSPGTPGSGTASSSPGASPGTSSTGSPGASPGTSSTGSPGASPGTSSTGSPGSSPSASTGTGPGTPGSGTASSSPGASPGTSSTGSPGASPGTSSTGSPGASPGTSSTGSPGSSTPSGATGSPGSSTPSGATGSPGASPGTSSTGSPGTPGSGTASSSPGSSTPSGATGSPGSSTPSGATGSPGSSTPSGATGSPGSSPSASTGTGPGASPGTSSTGSPGASPGTSSTGSPGTPGSGTASSSPGASPGTSSTGSPGASPGTSSTGSPGASPGTSSTGSPGASPGTSSTGSPGTPGSGTASSSPGSSTPSGATGSPGTPGSGTASSSPGSSTPSGATGSPGTPGSGTASSSPGSSTPSGATGSPGSSTPSGATGSPGSSPSASTGTGPGSSPSASTGTGPGASPGTSSTGSPGTPGSGTASSSPGSSTPSGATGSPGSSPSASTGTGPGSSPSASTGTGPGASPGTSSTGSPGASPGTSSTGSPGSSTPSGATGSPGSSPSASTGTGPGASPGTSSTGSPGSSPSASTGTGPGTPGSGTASSSPGSSTPSGATGSPGSSTPSGATGSPGASPGTSSTGSP

SEQ ID NO: 943 - protein, 1763 aa, Artificial Sequence
  Description of Artificial Sequence: Synthetic polypeptide
ATRRYYLGAVELSWDYMQSDLGELPVDARFPPRVPKSFPFNTSVVYKKTLFVEFTDHLFNIAKPRPPWMGLLGPTIQAEVYDTVVITLKNMASHPVSLHAVGVSYWKASEGAEYDDQTSQREKEDDKVFPGGSHTYVWQVLKENGPMASDPLCLTYSYLSHVDLVKDLNSGLIGALLVCREGSLAKEKTQTLHKFILLFAVFDEGKSWHSETKNSLMQDRDAASARAWPKMHTVNGYVNRSLPGLIGCHRKSVYWHVIGMGTTPEVHSIFLEGHTFLVRNHRQASLEISPITFLTAQTLLMDLGQFLLFCHISSHQHDGMEAYVKVDSCPEEPQLRMKNNEEAEDYDDDLTDSEMDVVRFDDDNSPSFIQIRSVAKKHPKTWVHYIAAEEEDWDYAPLVLAPDDRSYKSQYLNNGPQRIGRKYKKVRFMAYTDETFKTREAIQHESGILGPLLYGEVGDTLLIIFKNQASRPYNIYPHGITDVRPLYSRRLPKGVKHLKDFPILPGEIFKYKWTVTVEDGPTKSDPRCLTRYYSSFVNMERDLASGLIGPLLICYKESVDQRGNQIMSDKRNVILFSVFDENRSWYLTENIQRFLPNPAGVQLEDPEFQASNIMHSINGYVFDSLQLSVCLHEVAYWYILSIGAQTDFLSVFFSGYTFKHKMVYEDTLTLFPFSGETVFMSMENPGLWILGCHNSDFRNRGMTALLKVSSCDKNTGDYYEDSYEDISAYLLSKNNAIEPRSFSQNPPVLKRHQAEITRTTLQSDQEEIDYDDTISVEMKKEDFDIYDEDENQSPRSFQKKTRHYFIAAVERLWDYGMSSSPHVLRNRAQSGSVPQFKKVVFQEFTDGSFTQPLYRGELNEHLGLLGPYIRAEVEDNIMVTFRNQASRPYSFYSSLISYEEDQRQGAEPRKNFVKPNETKTYFWKVQHHMAPTKDEFDCKAWAYFSDVDLEKDVHSGLIGPLLVCHTNTLNPAHGRQVTVQEFALFFTIFDETKSWYFTENMERNCRAPCNIQMEDPTFKENYRFHAINGYIMDTLPGLVMAQDQRIRWYLLSMGSNENIHSIHFSGHVFTVRKKEEYKMALYNLYPGVFETVEMLPSKAGIWRVECLIGEHLHAGMSTLFLVYSNKCQTPLGMASGHIRDFQITASGQYGQWAPKLARLHYSGSINAWSTKEPFSWIKVDLLAPMIIHGIKTQGARQKFSSLYISQFIIMYSLDGKKWQTYRGNSTGTLMVFFGNVDSSGIKHNIFNPPIIARYIRLHPTHYSIRSTLRMELMGCDLNSCSMPLGMESKAISDAQITASSYFTNMFATWSPSKARLHLQGRSNAWRPQVNNPKEWLQVDFQKTMKVTGVTTQGVKSLLTSMYVKEFLISSSQDGHQWTLFFQNGKVKVFQGNQDSFTPVVNSLDPPLLTRYLRIHPQSWVHQIALRMEVLGCEAQDLYKLTRAETGAGSPGAETAPGASPGTSSTGSPGASPGTSSTGSPGTPGSGTASSSPGSSTPSGATGSPGTPGSGTASSSPGSSTPSGATGSPGTPGSGTASSSPGSSTPSGATGSPGSSTPSGATGSPGSSPSASTGTGPGSSPSASTGTGPGASPGTSSTGSPGTPGSGTASSSPGSSTPSGATGSPGSSPSASTGTGPGSSPSASTGTGPGASPGTSSTGSPGASPGTSSTGSPGSSTPSGATGSPGSSPSASTGTGPGASPGTSSTGSPGSSPSASTGTGPGTPGSGTASSSPGSSTPSGATGSGAETAEQKLISEEDLSPATG

SEQ ID NO: 944 - protein, 2310 aa, Artificial Sequence [sequence omitted]

SEQ ID NO: 945 - protein, 2310 aa, Artificial Sequence
  Description of Artificial Sequence: Synthetic polypeptide
ATRRYYLGAVELSWDYMQSDLGELPVDARFPPRVPKSFPFNTSVVYKKTLFVEFTDHLFNIAKPRPPWMGLLGPTIQAEVYDTVVITLKNMASHPVSLHAVGVSYWKASEGAEYDDQTSQREKEDDKVFPGGSHTYVWQVLKENGPMASDPLCLTYSYLSHVDLVKDLNSGLIGALLVCREGSLAKEKTQTLHKFILLFAVFDEGKSWHSETKNSLMQDRDAASARAWPKMHTVNGYVNRSLPGLIGCHRKSVYWHVIGMGTTPEVHSIFLEGHTFLVRNHRQASLEISPITFLTAQTLLMDLGQFLLFCHISSHQHDGMEAYVKVDSCPEEPQLRMKNNEEAEDYDDDLTDSEMDVVRFDDDNSPSFIQIRSVAKKHPKTWVHYIAAEEEDWDYAPLVLAPDDRSYKSQYLNNGPQRIGRKYKKVRFMAYTDETFKTREAIQHESGILGPLLYGEVGDTLLIIFKNQASRPYNIYPHGITDVRPLYSRRLPKGVKHLKDFPILPGEIFKYKWTVTVEDGPTKSDPRCLTRYYSSFVNMERDLASGLIGPLLICYKESVDQRGNQIMSDKRNVILFSVFDENRSWYLTENIQRFLPNPAGVQLEDPEFQASNIMHSINGYVFDSLQLSVCLHEVAYWYILSIGAQTDFLSVFFSGYTFKHKMVYEDTLTLFPFSGETVFMSMENPGLWILGCHNSDFRNRGMTALLKVSSCDKNTGDYYEDSYEDISAYLLSKNNAIEPRSFSQNPPVLKRHQAEITRTTLQSDQEEIDYDDTISVEMKKEDFDIYDEDENQSPRSFQKKTRHYFIAAVERLWDYGMSSSPHVLRNRAQSGSVPQFKKVVFQEFTDGSFTQPLYRGELNEHLGLLGPYIRAEVEDNIMVTFRNQASRPYSFYSSLISYEEDQRQGAEPRKNFVKPNETKTYFWKVQHHMAPTKDEFDCKAWAYFSDVDLEKDVHSGLIGPLLVCHTNTLNPAHGRQVTVQEFALFFTIFDETKSWYFTENMERNCRAPCNIQMEDPTFKENYRFHAINGYIMDTLPGLVMAQDQRIRWYLLSMGSNENIHSIHFSGHVFTVRKKEEYKMALYNLYPGVFETVEMLPSKAGIWRVECLIGEHLHAGMSTLFLVYSNKCQTPLGMASGHIRDFQITASGQYGQWAPKLARLHYSGSINAWSTKEPFSWIKVDLLAPMIIHGIKTQGARQKFSSLYISQFIIMYSLDGKKWQTYRGNSTGTLMVFFGNVDSSGIKHNIFNPPIIARYIRLHPTHYSIRSTLRMELMGCDLNSCSMPLGMESKAISDAQITASSYFTNMFATWSPSKARLHLQGRSNAWRPQVNNPKEWLQVDFQKTMKVTGVTTQGVKSLLTSMYVKEFLISSSQDGHQWTLFFQNGKVKVFQGNQDSFTPVVNSLDPPLLTRYLRIHPQSWVHQIALRMEVLGCEAQDLYKLTRAETGGSPAGSPTSTEEGTSESATPESGPGTSTEPSEGSAPGSPAGSPTSTEEGTSTEPSEGSAPGTSTEPSEGSAPGTSESATPESGPGSEPATSGSETPGSEPATSGSETPGSPAGSPTSTEEGTSESATPESGPGTSTEPSEGSAPGTSTEPSEGSAPGSPAGSPTSTEEGTSTEPSEGSAPGTSTEPSEGSAPGTSESATPESGPGTSTEPSEGSAPGTSESATPESGPGSEPATSGSETPGTSTEPSEGSAPGTSTEPSEGSAPGTSESATPESGPGTSESATPESGPGSPAGSPTSTEEGTSESATPESGPGSEPATSGSETPGTSESATPESGPGTSTEPSEGSAPGTSTEPSEGSAPGTSTEPSEGSAPGTSTEPSEGSAPGTSTEPSEGSAPGTSTEPSEGSAPGSPAGSPTSTEEGTSTEPSEGSAPGTSESATPESGPGSEPATSGSETPGTSESATPESGPGSEPATSGSETPGTSESATPESGPGTSTEPSEGSAPGTSESATPESGPGSPAGSPTSTEEGSPAGSPTSTEEGSPAGSPTSTEEGTSESATPESGPGTSTEPSEGSAPGTSESATPESGPGSEPATSGSETPGTSESATPESGPGSEPATSGSETPGTSESATPESGPGTSTEPSEGSAPGSPAGSPTSTEEGTSESATPESGPGSEPATSGSETPGTSESATPESGPGSPAGSPTSTEEGSPAGSPTSTEEGTSTEPSEGSAPGTSESATPESGPGTSESATPESGPGTSESATPESGPGSEPATSGSETPGSEPATSGSETPGSPAGSPTSTEEGTSTEPSEGSAPGTSTEPSEGSAPGSEPATSGSETPGTSESATPESGPGTSTEPSEGSAP

SEQ ID NO: 946 - protein, 1438 aa, Artificial Sequence; identical to SEQ ID NO: 889
  Description of Artificial Sequence: Synthetic polypeptide

SEQ ID NO: 947 - protein, 1441 aa, Artificial Sequence
  Description of Artificial Sequence: Synthetic polypeptide
ATRATRRYYLGAVELSWDYMQSDLGELPVDARFPPRVPKSFPFNTSVVYKKTLFVEFTDHLFNIAKPRPPWMGLLGPTIQAEVYDTVVITLKNMASHPVSLHAVGVSYWKASEGAEYDDQTSQREKEDDKVFPGGSHTYVWQVLKENGPMASDPLCLTYSYLSHVDLVKDLNSGLIGALLVCREGSLAKEKTQTLHKFILLFAVFDEGKSWHSETKNSLMQDRDAASARAWPKMHTVNGYVNRSLPGLIGCHRKSVYWHVIGMGTTPEVHSIFLEGHTFLVRNHRQASLEISPITFLTAQTLLMDLGQFLLFCHISSHQHDGMEAYVKVDSCPEEPQLRMKNNEEAEDYDDDLTDSEMDVVRFDDDNSPSFIQIRSVAKKHPKTWVHYIAAEEEDWDYAPLVLAPDDRSYKSQYLNNGPQRIGRKYKKVRFMAYTDETFKTREAIQHESGILGPLLYGEVGDTLLIIFKNQASRPYNIYPHGITDVRPLYSRRLPKGVKHLKDFPILPGEIFKYKWTVTVEDGPTKSDPRCLTRYYSSFVNMERDLASGLIGPLLICYKESVDQRGNQIMSDKRNVILFSVFDENRSWYLTENIQRFLPNPAGVQLEDPEFQASNIMHSINGYVFDSLQLSVCLHEVAYWYILSIGAQTDFLSVFFSGYTFKHKMVYEDTLTLFPFSGETVFMSMENPGLWILGCHNSDFRNRGMTALLKVSSCDKNTGDYYEDSYEDISAYLLSKNNAIEPRSFSQNPPVLKRHQAEITRTTLQSDQEEIDYDDTISVEMKKEDFDIYDEDENQSPRSFQKKTRHYFIAAVERLWDYGMSSSPHVLRNRAQSGSVPQFKKVVFQEFTDGSFTQPLYRGELNEHLGLLGPYIRAEVEDNIMVTFRNQASRPYSFYSSLISYEEDQRQGAEPRKNFVKPNETKTYFWKVQHHMAPTKDEFDCKAWAYFSDVDLEKDVHSGLIGPLLVCHTNTLNPAHGRQVTVQEFALFFTIFDETKSWYFTENMERNCRAPCNIQMEDPTFKENYRFHAINGYIMDTLPGLVMAQDQRIRWYLLSMGSNENIHSIHFSGHVFTVRKKEEYKMALYNLYPGVFETVEMLPSKAGIWRVECLIGEHLHAGMSTLFLVYSNKCQTPLGMASGHIRDFQITASGQYGQWAPKLARLHYSGSINAWSTKEPFSWIKVDLLAPMIIHGIKTQGARQKFSSLYISQFIIMYSLDGKKWQTYRGNSTGTLMVFFGNVDSSGIKHNIFNPPIIARYIRLHPTHYSIRSTLRMELMGCDLNSCSMPLGMESKAISDAQITASSYFTNMFATWSPSKARLHLQGRSNAWRPQVNNPKEWLQVDFQKTMKVTGVTTQGVKSLLTSMYVKEFLISSSQDGHQWTLFFQNGKVKVFQGNQDSFTPVVNSLDPPLLTRYLRIHPQSWVHQIALRMEVLGCEAQDLY

SEQ ID NO: 948 - protein, 11 aa, Artificial Sequence
  Description of Artificial Sequence: Synthetic peptide
ASTGETGETGE

SEQ ID NO: 949 - protein, 1438 aa, Artificial Sequence; identical to SEQ ID NO: 12
  Description of Artificial Sequence: Synthetic polypeptide

SEQ ID NO: 950 - protein, 864 aa, Artificial Sequence; identical to SEQ ID NO: 80
  Description of Artificial Sequence: Synthetic polypeptide

SEQ ID NO: 951 - protein, 576 aa, Artificial Sequence; identical to SEQ ID NO: 75
  Description of Artificial Sequence: Synthetic polypeptide

SEQ ID NO: 952 - protein, 881 aa, Artificial Sequence
  Description of Artificial Sequence: Synthetic polypeptide
GASPGTSSTGSPGSSPSASTGTGPGSSPSASTGTGPGTPGSGTASSSPGSSTPSGATGSPGSSPSASTGTGPGASPGTSSTGSPGTPGSGTASSSPGSSTPSGATGSPGTPGSGTASSSPGASPGTSSTGSPGASPGTSSTGSPGTPGSGTASSSPGSSTPSGATGSPGASPGTSSTGSPGTPGSGTASSSPGSSTPSGATGSPGSSPSASTGTGPGSSPSASTGTGPGSSTPSGATGSPGSSTPSGATGSPGASPGTSSTGSPGASPGTSSTGSPGASPGTSSTGSPGTPGSGTASSSPGASPGTSSTGSPGASPGTSSTGSPGASPGTSSTGSPGSSPSASTGTGPGTPGSGTASSSPGASPGTSSTGSPGASPGTSSTGSPGASPGTSSTGSPGSSTPSGATGSPGSSTPSGATGSPGASPGTSSTGSPGTPGSGTASSSPGSSTPSGATGSPGSSTPSGATGSPGSSTPSGATGSPGSSPSASTGTGPGASPGTSSTGSPGASPGTSSTGSPGTPGSGTASSSPGASPGTSSTGSPGASPGTSSTGSPGASPGTSSTGSPGASPGTSSTGSPGTPGSGTASSSPGSSTPSGATGSPGTPGSGTASSSPGSSTPSGATGSPGTPGSGTASSSPGSSTPSGATGSPGSSTPSGATGSPGSSPSATASSSPGSSTPSGATGSSTGTGPGSSPSASTGTGPGASPGTSSTGSPGTPGSGTASSSPGSSTPSGATGSPGSSPSASTGTGPGSSPSASTGTGPGASPGTSSTGSPGASPGTSSTGSPGSSTPSGATGSPGSSPSASTGTGPGASPGTSSTGSPGSSPSASTGTGPGTPGSGTASSSPGSSTPSGATGSPGSSTPSGATGSPGASPGTSSTGSP

SEQ ID NO: 953 - protein, 316 aa, Artificial Sequence; identical to SEQ ID NO: 67
  Description of Artificial Sequence: Synthetic polypeptide

SEQ ID NO: 954 - protein, 864 aa, Artificial Sequence; identical to SEQ ID NO: 80
  Description of Artificial Sequence: Synthetic polypeptide

SEQ ID NO: 955 - protein, 144 aa, Artificial Sequence; identical to SEQ ID NO: 62
  Description of Artificial Sequence: Synthetic polypeptide

SEQ ID NO: 956 - protein, 864 aa, Artificial Sequence; identical to SEQ ID NO: 78
  Description of Artificial Sequence: Synthetic polypeptide

SEQ ID NO: 957 - protein, 576 aa, Artificial Sequence; identical to SEQ ID NO: 73
  Description of Artificial Sequence: Synthetic polypeptide

SEQ ID NO: 958 - protein, 864 aa, Artificial Sequence; identical to SEQ ID NO: 78
  Description of Artificial Sequence: Synthetic polypeptide

SEQ ID NO: 959 - protein, 288 aa, Artificial Sequence; identical to SEQ ID NO: 66
  Description of Artificial Sequence: Synthetic polypeptide

SEQ ID NO: 960 - DNA, 70 bp, Artificial Sequence
  Description of Artificial Sequence: Synthetic oligonucleotide
ctagcatgcaaatagagctctccacctgcttctttctgtgccttttgcgattctgctttagtgggtctcc

SEQ ID NO: 961 - DNA, 70 bp, Artificial Sequence
  Description of Artificial Sequence: Synthetic oligonucleotide
acctggagacccactaaagcagaatcgcaaaaggcacagaaagaagcaggtggagagctctatttgcatg

What is claimed is:

1. An isolated fusion protein comprising a factor VIII polypeptide and at least one extended recombinant polypeptide (XTEN), wherein said factor VIII polypeptide comprises A1 domain, A2 domain, A3 domain, C1 domain, C2 domain and optionally all or a portion of B domain, and wherein said at least one XTEN is linked to said factor VIII polypeptide at (i) the C-terminus of said factor VIII polypeptide; (ii) within B domain of said factor VIII polypeptide if all or a portion of B domain is present; (iii) within a surface loop of the A1 domain of said factor VIII polypeptide; (iv) within a surface loop of the A2 domain of said factor VIII polypeptide; (v) within a surface loop of the A3 domain of said factor VIII polypeptide; (vi) within the C1 domain of said factor VIII polypeptide; or (vii) within the C2 domain of said factor VIII polypeptide; and wherein the XTEN is characterized in that:
a. the XTEN comprises at least 36 amino acid residues;
b. the sum of glycine (G), alanine (A), serine (S), threonine (T), glutamate (E) and proline (P) residues constitutes more than about 80% of the total amino acid residues of the XTEN;
c. the XTEN is substantially non-repetitive such that (i) the XTEN contains no three contiguous amino acids that are identical unless the amino acids are serine; (ii) at least about 80% of the XTEN sequence consists of non-overlapping sequence motifs, each of the sequence motifs comprising about 9 to about 14 amino acid residues consisting of four to six types of amino acids selected from glycine (G), alanine (A), serine (S), threonine (T), glutamate (E) and proline (P), wherein any two contiguous amino acid residues do not occur more than twice in each of the non-overlapping sequence motifs; or (iii) the XTEN sequence has a subsequence score of less than 10;
d. the XTEN has greater than 90% random coil formation as determined by GOR algorithm;
e. the XTEN has less than 2% alpha helices and 2% beta-sheets as determined by Chou-Fasman algorithm; and
f. the XTEN lacks a predicted T-cell epitope when analyzed by TEPITOPE algorithm, wherein the TEPITOPE threshold score for said prediction by said algorithm has a threshold of −9 or greater,
wherein said fusion protein exhibits a terminal half-life that is extended at least three-fold when administered to a subject, compared to a corresponding factor VIII not linked to XTEN and administered to said subject.

2. The isolated fusion protein of claim 1, wherein the A1 domain spans residues 1-372 of SEQ ID NO: 7; the A2 domain spans residues 373-740 of SEQ ID NO: 7; the A3 domain spans residues 1649-2019 of SEQ ID NO: 7; the C1 domain spans residues 2020-2172 of SEQ ID NO: 7; and the C2 domain spans residues 2173-2332 of SEQ ID NO: 7.

3. The isolated fusion protein of claim 1, wherein the factor VIII sequence has at least 90% sequence identity compared to a sequence selected from Table 1 when optimally aligned.

4. The isolated fusion protein of claim 1, wherein the factor VIII sequence is human factor VIII.

5. The isolated fusion protein of claim 1, wherein the factor VIII sequence is a B-domain deleted factor VIII sequence.

6. The isolated fusion protein of claim 1, wherein the factor VIII sequence is linked at its C-terminus to the XTEN.

7. The isolated fusion protein of claim 1, wherein the XTEN is inserted within the B domain of factor VIII.

8. The isolated fusion protein of claim 6, further comprising a second XTEN wherein the XTEN is inserted within the B domain of factor VIII.

9. The isolated fusion protein of claim 7, wherein the factor VIII comprises an internal deletion starting from a first position at about amino acid residue number 740 to about 750 and ending at a second position at amino acid residue number 1640 to about 1648 with reference to full-length human factor VIII, and wherein the XTEN links said first and second positions.

10. The isolated fusion protein of claim 1, wherein the surface loop of (iii), (iv), and/or (v) are identified by X-ray structure analysis of human FVIII.

11. The isolated fusion protein of claim 1 exhibiting an apparent molecular weight factor of at least about 4.

12. The isolated fusion protein of claim 11, comprising an additional XTEN inserted in an insertion site selected from Table 5.

13. The isolated fusion protein of claim 8, wherein said XTEN is characterized in that the cumulative total of XTEN amino acid residues is between about 200 to about 3000 amino acid residues.

14. The isolated fusion protein of claim 1, wherein the XTEN sequence has at least 90% sequence identity compared to one or more sequences selected from any one of Table 4, Table 8, Table 9, Table 10, Table 11, or Table 12, when suitably aligned.

15. The isolated fusion protein of claim 8, wherein said second XTEN sequence has at least 90% sequence identity compared to one or more sequences selected from any one of Table 4, Table 8, Table 9, Table 10, Table 11, or Table 12, when suitably aligned.

16. The isolated fusion protein of claim 1, wherein the XTEN has between about 100 to about 3000 amino acid residues.

17. The isolated fusion protein of claim 1, wherein the XTEN sequence has between about 144 to about 864 amino acid residues.

18. A pharmaceutical compositions comprising the fusion protein of claim 1 and a pharmaceutically acceptable carrier.

19. A method of treating coagulopathy in a subject, comprising administering to said subject a composition comprising a therapeutically effective amount of the pharmaceutical composition of claim 18.

20. The method of claim 19, wherein said coagulopathy is hemophilia A.

21. The method of claim 19, wherein the therapeutically effective amount of the pharmaceutical composition maintains a minimum effective concentration in the blood for a period that is at least two-fold longer compared to the corresponding factor VIII sequence not linked to XTEN and administered to a subject at a comparable dose.

22. A method of treating a bleeding episode in a subject comprising administering to said subject the pharmaceutical composition of claim 18.

23. A method of treating a subject deficient in a clotting protein, comprising administering to said subject the pharmaceutical composition of claim 18.

24. An isolated nucleic acid comprising a polynucleotide sequence selected from (a) a polynucleotide encoding the fusion protein of claim 1, or (b) the complement of the polynucleotide of (a).

25. An expression vector expression comprising the polynucleotide sequence of claim 24 and a recombinant regulatory sequence operably linked to the polynucleotide sequence.

26. A host cell comprising the expression vector of claim 25.
